(19) United States
(12) Patent Application Publication
(10) Pub. No.: US 2025/0136689 A1
(43) Pub. Date: May 1, 2025

(54) COMPOSITIONS FOR AND METHODS OF TREATING HEMATOLOGICAL CANCERS

(71) Applicant: Duke University, Durham, NC (US)

(72) Inventors: Fang Li, Durham, NC (US); Chuan-Yuan Li, Durham, NC (US)

(21) Appl. No.: 18/835,479

(22) PCT Filed: Feb. 3, 2023
(86) PCT No.: PCT/US2023/061925

§ 371 Date: Aug. 2, 2024

Related U.S. Application Data
(60) Provisional application No. 63/306,613, filed on Feb. 4, 2022.

(51) Int. Cl. C07K 16/28; A61K 40/11; A61K 40/15; A61K 40/17; A61K 40/31; A61K 40/41; A61K 45/06; A61K 47/68; A61P 35/02; C07K 16/44; C12N 15/86

(52) U.S. Cl. CPC C07K 16/2809; A61K 40/11; A61K 40/15; A61K 40/17; A61K 40/31; A61K 40/4285; A61K 45/06; A61K 47/6879; A61P 35/02; C07K 16/44; C12N 15/86; C07K 2317/31; C07K 2317/52; C07K 2317/569; C07K 2317/622

(57) ABSTRACT

Disclosed herein are compositions comprising a chimeric fusion protein targeting phosphatidylserine on the surface of hematological cancer cells and methods of using the compositions to treat a hematological cancer in a subject.

### CROSS-REFERENCE TO RELATED APPLICATIONS

[0001] This application claims priority to U.S. Provisional Application No. 63/306,613 filed 4 Feb. 2022, which is incorporated herein in its entirety.

### STATEMENT REGARDING FEDERALLY SPONSORED RESEARCH OR DEVELOPMENT

[0002] This invention was made with government support under CA216876 awarded by the National Institutes of Health. The government has certain rights in the invention.

### REFERENCE TO THE SEQUENCE LISTING

[0003] The Sequence Listing submitted 3 Feb. 2023 as an XML file named ‘23-2063-WO’, created on 3 Feb. 2023 and having a size of 1 MB is hereby incorporated by reference pursuant to 37 C.F.R. § 1.52(e)(5).

### BACKGROUND

[0004] In cancer treatment, it is highly desirable to exploit cancer-specific markers for therapeutic development. Many such markers are cell surface markers. Phosphatidylserine (PS) is an abundant lipid molecule and an integral part of the cellular membrane. Unlike other abundant lipid molecules that evenly distribute in both the outer and inner cellular membranes, phosphatidylserine normally only resides in the inner cellular membrane. PS often ‘flips’ from the inner to the outer cellular membrane in dying cells, especially in apoptotic cells. As a result, cell surface levels of PS have become the most widely used molecular marker to quantify cellular apoptosis in research. Most of the current paradigms for cancer therapy assumes that PS-expressing tumor cells, either from exposure to internal or external stressors, are destined to die from apoptosis. However, PS-expressing tumor cells may survive the activation of the apoptosis cascade. Thus, there remains an unmet medical need for ensuring the complete cell death of PS-expressing cancer cells including hematologic cancer cells as well as an unmet medical need for enhancing the efficacy of cancer therapies and/or treatments.

### BRIEF DESCRIPTION OF THE FIGURES

[0005] FIG. 1A-FIG. 1C show the survival of phosphatidylserine-expressing AML cells. FIG. 1A shows FACS sorting of untreated c1498 cells (in DMEM with 8% FBS). The rectangles indicate the sorted cells. FIG. 1B shows FACS sorting of c1498 cells treated with cytarabine (1 M) for 24 hrs). FIG. 1C shows the estimated live cell numbers in the sorted cells. About 1000 each of the sorted cells were placed into multi-well plates. When the cells reached sufficient numbers, they were counted at different time points to measure their growth rates. The growth rates were then used to estimate the initial live cell numbers. The following formula was used to calculate the minimal initial live cell numbers: Minimal initial cell number=Total cell population/(growth rate*t)(days to reach the current cell number).

[0006] FIG. 2A-FIG. 2B shows phagocytosis KG1a cells by macrophages. FIG. 2A shows the representative fluorescence images of phagocytosis assay. THP1 cells transduced with mCherry were differentiated into macrophages following previously established procedures. The macrophages were then incubated with non-treated or doxorubicin-treated KG1a human AML cell line transduced with EGFP in the presence of either isotype control (IgG1) or AnnexinV-IgG1Fc. After 2 hrs of incubation, the macrophages and the KG1a cells they have engulfed were counted. FIG. 2B shows quantitative estimates of phagocytosis of KG1a cells by THP1-derived macrophages. the phagocytic index is calculated as: (Average number of KG1a cells engulfed per macrophage)×(percentage of macrophages which have engulfed KG1a cells)×200.

[0007] FIG. 3 shows anti-tumor efficacy of Annexin V-Fc in the c1498. About 2×10⁵ c1498 cells were injected into the tail vein of C57BL/6 mice. At 24 hrs after the injection, the mice were treated with 100 mg/kg cytarabine (injected i.p. every 12 hrs for 3 times). At 24 hrs after the last treatment, Annexin V-Fc was given i.p. 4 times at 72 hours intervals. The mice were then observed and sacrificed until they were moribund. Shown were the survival of different mice after they were treated with different antibody and drug combinations.

[0008] FIG. 4 shows the tumor cell-killing efficacy of AnnexinV-OKT3 in MV4-11 human AML cells. Luciferase-labeled MV4-11 AML cells were mixed with PBMC cells at a ratio of 1:10. Bispecific proteins AnnexinV-scFv(OKT3)-Fc and AnnexinV-scFv(OKT3)-Hinge were added to the mixed cell population at different concentrations in 96-well plates. The survival of the MV4-11 cells were then quantified by measuring the luciferase activities of individual wells at 24 hrs post bispecific protein addition (n=3).

[0009] FIG. 5A-FIG. 5H shows different versions of the Annexin V-scFv (αCD3) bispecific fusion protein. FIG. 5A shows an AnnexinV-αCD3 BITE fusion protein. FIG. 5B shows an (AnnexinV-scFv(αCD3) BITE-Fc)₂ fusion protein. FIG. 5C shows an (AnnexinV-scFv(αCD3)-Hinge)₂ fusion protein. FIG. 5D shows an (AnnexinV-Fc):(scFv(αCD3)-Fc) fusion protein. FIG. 5E shows an AnnexinV-scFv(αCD3))-Fc:Fc fusion protein. FIG. 5F shows an (Annexin V-Fc-SIRPα)₂ fusion protein. FIG. 5G show an (AnnexinV-SIRPα-Fc)₂ fusion protein. FIG. 5H shows an (AnnexinV-Fc-NKG2D)₂ fusion protein. In D&E, Fc domains have the knobs-in-holes structure to facilitate heterodimerization.

### BRIEF SUMMARY

[0010] Disclosed herein is a chimeric fusion protein comprising a phosphatidylserine (PS) binding domain operably linked an immunostimulatory domain. Disclosed herein is a chimeric fusion protein comprising a phosphatidylserine (PS) binding domain operably linked to an immunostimulatory domain, wherein the immunostimulatory domain further comprises a conjugated small molecule. Disclosed herein is a chimeric fusion protein comprising a secretion signal and a phosphatidylserine (PS) binding domain operably linked an immunostimulatory domain. Disclosed herein is a chimeric fusion protein comprising a secretion signal and a phosphatidylserine (PS) binding domain operably linked to an immunostimulatory domain, wherein the immunostimulatory domain further comprises a conjugated small molecule. Disclosed herein is a chimeric fusion protein comprising a PS-binding domain operably linked to an IgG1 Fc domain and an additional immunostimulatory domain. Disclosed herein is a chimeric fusion protein comprising a PS-binding domain operably linked to an IgG1 Fc domain and an additional immunostimulatory domain, wherein the additional immunostimulatory domain comprises the IgV domain of SIRPα or the extracellular domain of NKG2D protein. Disclosed herein is a chimeric fusion protein comprising a PS-binding domain operably linked to a single-chain antibody (scFV) to a human CD3 protein. Disclosed herein is a chimeric fusion protein comprising an Annexin-binding domain operably linked to a single-chain antibody (scFV) to a human CD3 protein. Disclosed herein is a chimeric fusion protein comprising a PS-binding domain operably linked to a single-chain antibody (scFV) to a human CD3 protein and one or more additional immunostimulatory domains. Disclosed herein is a chimeric fusion protein comprising an Annexin-binding domain operably linked to a single-chain antibody (scFV) to a human CD3 protein and one or more additional immunostimulatory domains.

[0011] Disclosed herein is an antibody-drug conjugate comprising a disclosed chimeric fusion protein comprising a phosphatidylserine (PS) binding domain. Disclosed herein is an antibody-drug conjugate comprising a disclosed chimeric fusion protein comprising a phosphatidylserine (PS) binding domain and an immunostimulatory domain. Disclosed herein is an antibody drug conjugate comprising a disclosed chimeric fusion protein comprising a phosphatidylserine (PS) binding domain operably linked to an immunostimulatory domain, wherein the immunostimulatory domain further comprises a conjugated small molecule. Disclosed herein is an antibody-drug conjugate comprising a disclosed chimeric fusion protein comprising a secretion signal and a phosphatidylserine (PS) binding domain. Disclosed herein is an antibody-drug conjugate comprising a disclosed chimeric fusion protein comprising a secretion signal, a phosphatidylserine (PS) binding domain, and an immunostimulatory domain. Disclosed herein is an antibody drug conjugate comprising a disclosed chimeric fusion protein comprising a secretion signal and a phosphatidylserine (PS) binding domain operably linked to an immunostimulatory domain, wherein the immunostimulatory domain further comprise a conjugated small molecule. Disclosed herein is an antibody-drug conjugate comprising a disclosed chimeric fusion protein comprising a PS-binding domain operably linked to an IgG1 Fc domain. Disclosed herein is an antibody-drug conjugate comprising a disclosed chimeric fusion protein comprising a PS-binding domain operably linked to an IgG1 Fc domain and an additional immunostimulatory domain. Disclosed herein is an antibody-drug conjugate comprising a disclosed chimeric fusion protein comprising a PS-binding domain operably linked to an IgG1 Fc domain and an additional immunostimulatory domain, wherein the additional immunostimulatory domain comprises the IgV domain of SIRPα or the extracellular domain of NKG2D protein. Disclosed herein is an antibody-drug conjugate comprising a disclosed chimeric fusion protein comprising a PS-binding domain operably linked to a single-chain antibody (scFV) to a human CD3 protein. Disclosed herein is an antibody-drug conjugate comprising a disclosed chimeric fusion protein comprising an Annexin-binding domain operably linked to a single-chain antibody (scFV) to a human CD3 protein.

[0012] Disclosed herein is an isolated nucleic acid molecule comprising a nucleic acid sequence encoding a chimeric fusion protein comprising a phosphatidylserine (PS) binding domain. Disclosed herein is an isolated nucleic acid molecule comprising a nucleic acid sequence encoding a chimeric fusion protein comprising a phosphatidylserine (PS) binding domain and an immunostimulatory domain. Disclosed herein is an isolated nucleic acid molecule comprising a nucleic acid sequence encoding a chimeric fusion protein comprising a phosphatidylserine (PS) binding domain operably linked an immunostimulatory domain. Disclosed herein is an isolated nucleic acid molecule comprising a nucleic acid sequence encoding a phosphatidylserine (PS) binding domain, a linker, and an immunostimulatory domain. Disclosed herein is an isolated nucleic acid molecule comprising a nucleic acid sequence encoding a chimeric fusion protein comprising a phosphatidylserine (PS) binding domain operably linked to an immunostimulatory domain, wherein the immunostimulatory domain further comprise a conjugated small molecule.

[0013] Disclosed herein is a vector comprising an isolated nucleic acid molecule comprising a nucleic acid sequence encoding a chimeric fusion protein comprising a phosphatidylserine (PS) binding domain and an immunostimulatory domain. Disclosed herein is a vector comprising an isolated nucleic acid molecule comprising a nucleic acid sequence encoding a chimeric fusion protein comprising a phosphatidylserine (PS) binding domain operably linked an immunostimulatory domain. Disclosed herein is a vector comprising an isolated nucleic acid molecule comprising a nucleic acid sequence encoding a chimeric fusion protein comprising a phosphatidylserine (PS) binding domain operably linked to an immunostimulatory domain, wherein the immunostimulatory domain further comprise a conjugated small molecule. Disclosed herein is a vector comprising an isolated nucleic acid molecule comprising a nucleic acid sequence encoding a chimeric fusion protein comprising a secretion signal and a phosphatidylserine (PS) binding domain operably linked an immunostimulatory domain. Disclosed herein is a vector comprising an isolated nucleic acid molecule comprising a nucleic acid sequence encoding a chimeric fusion protein comprising a secretion signal, a phosphatidylserine (PS) binding domain, a linker, and an immunostimulatory domain.

[0014] Disclosed herein is a method of treating a hematological cancer, the method comprising treating a subject in need thereof by administering to the subject in need thereof a therapeutically effective amount of a disclosed chimeric fusion protein or a pharmaceutical formulation thereof. Disclosed herein is a method of treating a hematological cancer, the method comprising treating a subject in need thereof by administering to the subject in need thereof a therapeutically effective amount of a disclosed chimeric fusion protein or a pharmaceutical formulation thereof. Disclosed herein is a method of treating a hematological cancer, the method comprising treating a subject in need thereof by administering to the subject in need thereof a therapeutically effective amount of a disclosed chimeric fusion protein targeting phosphatidylserine (PS) or a pharmaceutical formulation thereof. Disclosed herein is a method of treating a hematological cancer, the method comprising treating a subject in need thereof by administering to the subject in need thereof a therapeutically effective amount of a disclosed chimeric fusion protein targeting phosphatidylserine-expressing tumor cells or a pharmaceutical formulation thereof.

[0015] Disclosed herein is a method of improving the efficacy of cancer therapy, the method comprising treating a subject in need thereof by administering to the subject in need thereof a therapeutically effective amount of one or more cells transduced with a disclosed chimeric fusion protein or a pharmaceutical formulation thereof. Disclosed herein is a method of improving the efficacy of cancer therapy, the method comprising treating a subject in need thereof by administering to the subject in need thereof a therapeutically effective amount of a disclosed chimeric fusion protein or a pharmaceutical formulation thereof. Disclosed herein is a method of improving the efficacy of cancer therapy, the method comprising treating a subject in need thereof by administering to the subject in need thereof a therapeutically effective amount of a disclosed chimeric fusion protein targeting phosphatidylserine (PS) or a pharmaceutical formulation thereof.

[0016] Disclosed herein is a method of improving the efficacy of cancer therapy, the method comprising treating a subject in need thereof by administering to the subject in need thereof a therapeutically effective amount of a disclosed chimeric fusion protein targeting phosphatidylserine-expressing tumor cells or a pharmaceutical formulation thereof.

### DETAILED DESCRIPTION

[0017] The present disclosure describes formulations, compounded compositions, kits, capsules, containers, and/or methods thereof. It is to be understood that the inventive aspects of which are not limited to specific synthetic methods unless otherwise specified, or to particular reagents unless otherwise specified, as such may, of course, vary. It is also to be understood that the terminology used herein is for the purpose of describing particular aspects only and is not intended to be limiting. Although any methods and materials similar or equivalent to those described herein can be used in the practice or testing of the present invention, example methods and materials are now described.

[0018] All publications mentioned herein are incorporated herein by reference to disclose and describe the methods and/or materials in connection with which the publications are cited. The publications discussed herein are provided solely for their disclosure prior to the filing date of the present application. Nothing herein is to be construed as an admission that the present invention is not entitled to antedate such publication by virtue of prior invention.

### A. Definitions

[0019] Before the present compounds, compositions, articles, systems, devices, and/or methods are disclosed and described, it is to be understood that they are not limited to specific synthetic methods unless otherwise specified, or to particular reagents unless otherwise specified, as such may, of course, vary. It is also to be understood that the terminology used herein is for the purpose of describing particular aspects only and is not intended to be limiting. Although any methods and materials similar or equivalent to those described herein can be used in the practice or testing of the present invention, example methods and materials are now described.

[0020] This disclosure describes inventive concepts with reference to specific examples. However, the intent is to cover all modifications, equivalents, and alternatives of the inventive concepts that are consistent with this disclosure.

[0021] As used in the specification and the appended claims, the singular forms “a”, “an”, and “the” include plural referents unless the context clearly dictates otherwise.

[0022] The phrase ‘consisting essentially of’ limits the scope of a claim to the recited components in a composition or the recited steps in a method as well as those that do not materially affect the basic and novel characteristic or characteristics of the claimed composition or claimed method. The phrase ‘consisting of’ excludes any component, step, or element that is not recited in the claim. The phrase ‘comprising’ is synonymous with ‘including’, ‘containing’, or ‘characterized by’, and is inclusive or open-ended. ‘Comprising’ does not exclude additional, unrecited components or steps.

[0023] As used herein, when referring to any numerical value, the term ‘about’ means a value falling within a range that is +10% of the stated value.

[0024] Ranges can be expressed herein as from ‘about’ one particular value, and/or to ‘about’ another particular value. When such a range is expressed, a further aspect includes from the one particular value and/or to the other particular value. Similarly, when values are expressed as approximations, by use of the antecedent ‘about,’ it will be understood that the particular value forms a further aspect. It will be further understood that the endpoints of each of the ranges are significant both in relation to the other endpoint and independently of the other endpoint. It is also understood that there are a number of values disclosed herein, and that each value is also herein disclosed as ‘about’ that particular value in addition to the value itself. For example, if the value ‘10’ is disclosed, then ‘about 10’ is also disclosed. It is also understood that each unit between two particular units are also disclosed. For example, if 10 and 15 are disclosed, then 11, 12, 13, and 14 are also disclosed.

[0025] References in the specification and concluding claims to parts by weight of a particular element or component in a composition denotes the weight relationship between the element or component and any other elements or components in the composition or article for which a part by weight is expressed. Thus, in a compound containing 2 parts by weight component X and 5 parts by weight component Y, X and Y are present at a weight ratio of 2:5, and are present in such ratio regardless of whether additional components are contained in the compound.

[0026] As used herein, the terms ‘optional’ or ‘optionally’ means that the subsequently described event or circumstance can or cannot occur, and that the description includes instances where said event or circumstance occurs and instances where it does not. In an aspect, a disclosed method can optionally comprise one or more additional steps, such as, for example, repeating an administering step or altering an administering step.

[0027] As used herein, the term ‘subject’ refers to the target of administration, e.g., a human being. The term ‘subject’ also includes domesticated animals (e.g., cats, dogs, etc.), livestock (e.g., cattle, horses, pigs, sheep, goats, etc.), and laboratory animals (e.g., mouse, rabbit, rat, guinea pig, fruit fly, etc.). Thus, the subject of the herein disclosed methods can be a vertebrate, such as a mammal, a fish, a bird, a reptile, or an amphibian. Alternatively, the subject of the herein disclosed methods can be a human, non-human primate, horse, pig, rabbit, dog, sheep, goat, cow, cat, guinea pig, or rodent. The term does not denote a particular age or sex, and thus, adult and child subjects, as well as fetuses, whether male or female, are intended to be covered. In an aspect, a subject can be a human patient. In an aspect, a subject can have cancer, be suspected of having cancer, or be at risk of developing cancer.

[0028] As used herein, the term ‘diagnosed’ means having been subjected to an examination by a person of skill, for example, a physician, and found to have a condition that can be diagnosed or treated by one or more of the disclosed chimeric fusion protein, the disclosed isolated nucleic acid molecules, the disclosed vectors, the disclosed cells, the disclosed pharmaceutical formulations, or a combination thereof, or by one or more of the disclosed methods. For example, ‘diagnosed with a disease or disorder’ means having been subjected to an examination by a person of skill, for example, a physician, and found to have a condition (such as a hematological cancer) that can be treated by one or more of the disclosed chimeric fusion protein, the disclosed isolated nucleic acid molecules, the disclosed vectors, the disclosed cells, the disclosed pharmaceutical formulations, or a combination thereof, or by one or more of the disclosed methods. For example, “suspected of having a disease or disorder” can mean having been subjected to an examination by a person of skill, for example, a physician, and found to have a condition (such as a hematological cancer) that can likely be treated by one or more of the disclosed chimeric fusion protein, the disclosed isolated nucleic acid molecules, the disclosed vectors, the disclosed cells, the disclosed pharmaceutical formulations, or a combination thereof, or by one or more of the disclosed methods. In an aspect, an examination can be physical, can involve various tests (e.g., blood tests, genotyping, biopsies, etc.), scans (e.g., CT scans, PET scans, etc.), and assays (e.g., enzymatic assay), or a combination thereof.

[0029] A “patient” refers to a subject afflicted with a disease or disorder (e.g., a hematological cancer). In an aspect, a patient can refer to a subject that has been diagnosed with or is suspected of having a disease or disorder such as a hematological cancer. In an aspect, a patient can refer to a subject that has been diagnosed with or is suspected of having a disease or disorder and is seeking treatment or receiving treatment for a disease or disorder (such as hematological cancer).

[0030] As used herein, the phrase “identified to be in need of treatment for a disease or disorder,” or the like, refers to selection of a subject based upon need for treatment of the disease or disorder. For example, a subject can be identified as having a need for treatment of a disease or disorder (e.g., a hematological cancer) based upon an earlier diagnosis by a person of skill and thereafter subjected to treatment for the cancer. In an aspect, the identification can be performed by a person different from the person making the diagnosis. In an aspect, the administration can be performed by one who performed the diagnosis.

[0031] As used herein, “activated” and “activation” can refer to the state of a T cell that has been sufficiently stimulated to induce detectable cellular proliferation. Activation can also be associated with induced cytokine production and detectable effector functions. The term “activated T cells” can refer to T cells that are proliferating. Signals generated through the TCR alone may be insufficient for full activation of the T cell and one or more secondary or costimulatory signals may also be required. Thus, T cell activation comprises a primary stimulation signal through the TCR/CD3 complex and one or more secondary costimulatory signals. Costimulation can be evidenced by proliferation and/or cytokine production by T cells that have received a primary activation signal, such as stimulation through the TCR/CD3 complex.

[0032] As used herein, “inhibit,” “inhibiting”, and “inhibition” mean to diminish or decrease an activity, level, response, condition, severity, disease, or other biological parameter. This can include, but is not limited to, the complete ablation of the activity, level, response, condition, severity, disease, or other biological parameter. This can also include, for example, a 10% inhibition or reduction in the activity, level, response, condition, severity, disease, or other biological parameter as compared to the native or control level (e.g., a subject not having received one or more of the disclosed chimeric fusion proteins, the disclosed isolated nucleic acid molecules, the disclosed vectors, the disclosed cells, the disclosed pharmaceutical formulations, or a combination thereof). Thus, in an aspect, the inhibition or reduction can be a 10%, 20%, 30%, 40%, 50%, 60%, 70%, 80%, 90%, 100%, or any amount of reduction in between as compared to native or control levels. In an aspect, the inhibition or reduction can be 10-20%, 20-30%, 30-40%, 40-50%, 50-60%, 60-70%, 70-80%, 80-90%, or 90-100% as compared to a native or control level (e.g., a subject not having received one or more of the disclosed chimeric fusion proteins, the disclosed isolated nucleic acid molecules, the disclosed vectors, the disclosed cells, the disclosed pharmaceutical formulations, or a combination thereof). In an aspect, the inhibition or reduction can be 0-25%, 25-50%, 50-75%, or 75-100% as compared to native or control levels. In an aspect, a native or control level can be a pre-disease or pre-disorder level (such as a pre-cancer state).

[0033] The words “treat” or “treating” or “treatment” include palliative treatment, that is, treatment designed for the relief of symptoms rather than the curing of the disease, pathological condition, or disorder (e.g., a hematological cancer); preventative treatment, that is, treatment directed to minimizing or partially or completely inhibiting the development of the associated disease, pathological condition, or disorder (e.g., a hematological cancer); and supportive treatment, that is, treatment employed to supplement another specific therapy directed toward the improvement of the associated disease, pathological condition, or disorder (e.g., a hematological cancer). In an aspect, the terms cover any treatment of a subject, including a mammal (e.g., a human), and includes: (i) preventing the undesired physiological change, disease, pathological condition, or disorder from occurring in a subject that can be predisposed to the disease but has not yet been diagnosed as having it; (ii) inhibiting the physiological change, disease, pathological condition, or disorder, i.e., arresting its development; or (iii) relieving the physiological change, disease, pathological condition, or disorder, i.e., causing regression of the disease. For example, in an aspect, treating a disease or disorder can reduce the severity of an established a disease or disorder in a subject by 1%-100% as compared to a control (such as, for example, an individual not having cancer). In an aspect, treating can refer to a 1%, 2%, 3%, 4%, 5%, 6%, 7%, 8%, 9%, 10%, 20%, 30%, 40%, 50%, 60%, 70%, 80%, 90%, or 100% reduction in the severity of a disease or disorder (e.g., a hematological cancer). For example, treating a disease or disorder can reduce one or more symptoms of a disease or disorder in a subject by 1%-100% as compared to a control (such as, for example, an individual not having cancer). In an aspect, treating can refer to 1%, 2%, 3%, 4%, 5%, 6%, 7%, 8%, 9%, 10%, 20%, 30%, 40%, 50%, 60%, 70%, 80%, 90%, 100% reduction of one or more symptoms of an established a disease or disorder (e.g., a hematological cancer). It is understood that treatment does not necessarily refer to a cure or complete ablation or eradication of a disease or disorder. However, in an aspect, treatment can refer to a cure or complete ablation or eradication of a disease or disorder (such as a hematological cancer).

[0034] As used herein, the term “prevent” or “preventing” or “prevention” refers to precluding, averting, obviating, forestalling, stopping, or hindering something from happening, especially by advance action. It is understood that where reduce, inhibit, or prevent are used herein, unless specifically indicated otherwise, the use of the other two words is also expressly disclosed. In an aspect, preventing a disease or disorder having chromatin deregulation and/or chromatin dysregulation is intended. The words “prevent”, “preventing”, and “prevention” also refer to prophylactic or preventative measures for protecting or precluding a subject (e.g., an individual) not having a given a disease or disorder (such as a hematological cancer) or related complication from progressing to that complication. In an aspect, preventing metastasis is intended.

[0035] As used herein, the terms “administering” and “administration” refer to any method of providing one or more of the disclosed chimeric fusion proteins, the disclosed isolated nucleic acid molecules, the disclosed vectors, the disclosed cells, the disclosed pharmaceutical formulations, or a combination thereof, or by one or more of the disclosed methods to a subject. Such methods are well known to those skilled in the art and include, but are not limited to, the following: oral administration, transdermal administration, administration by inhalation, nasal administration, topical administration, in utero administration, intratumoral administration, intrahepatic administration, intravaginal administration, ophthalmic administration, intraaural administration, otic administration, intracerebral administration, rectal administration, sublingual administration, buccal administration, and parenteral administration, including injectable such as intravenous administration, intra-CSF administration, intra-arterial administration, intramuscular administration, and subcutaneous administration. Administration can also include hepatic intra-arterial administration or administration through the hepatic portal vein (HPV). Administration of one or more of the disclosed chimeric fusion proteins, the disclosed isolated nucleic acid molecules, the disclosed vectors, the disclosed cells, the disclosed pharmaceutical formulations, or a combination thereof can comprise administration directly into the CNS or the PNS. Administration can be continuous or intermittent. Administration can comprise a combination of one or more routes.

[0036] In an aspect, the skilled person can determine an efficacious dose, an efficacious schedule, and an efficacious route of administration one or more of the disclosed chimeric fusion proteins, the disclosed isolated nucleic acid molecules, the disclosed vectors, the disclosed cells, the disclosed pharmaceutical formulations, or a combination thereof to treat or prevent a disease or disorder (such as a hematological cancer). In an aspect, the skilled person can also alter, change, or modify an aspect of an administering step to improve efficacy of one or more of the disclosed chimeric fusion proteins, the disclosed isolated nucleic acid molecules, the disclosed vectors, the disclosed cells, the disclosed pharmaceutical formulations, or a combination thereof.

[0037] By “determining the amount” is meant both an absolute quantification of a particular analyte (e.g., biomarker for hematological cancer, for example) or a determination of the relative abundance of a particular analyte (e.g., a hematological cancer biomarker). The phrase includes both direct or indirect measurements of abundance or both.

[0038] As used herein, “modifying the method” can comprise modifying or changing one or more features or aspects of one or more steps of a disclosed method. In an aspect, a method can be altered by changing the amount of the one or more of the disclosed chimeric fusion proteins, the disclosed isolated nucleic acid molecules, the disclosed vectors, the disclosed cells, the disclosed pharmaceutical formulations, or a combination thereof administered to a subject, or by changing the frequency of administration of the one or more of the disclosed chimeric fusion proteins, the disclosed isolated nucleic acid molecules, the disclosed vectors, the disclosed cells, the disclosed pharmaceutical formulations, or a combination thereof to a subject, by changing the duration of time that one or more of the disclosed chimeric fusion proteins, the disclosed isolated nucleic acid molecules, the disclosed vectors, the disclosed cells, the disclosed pharmaceutical formulations, or a combination thereof is administered to a subject, or by substituting for one or more of the disclosed components and/or reagents with a similar or equivalent component and/or reagent. The same applies to all disclosed chimeric fusion proteins, disclosed isolated nucleic acid molecules, disclosed vectors disclosed cells, disclosed pharmaceutical formulations, and any combination thereof.

[0039] As used herein, the term “pharmaceutically acceptable carrier” refers to sterile aqueous or nonaqueous solutions, dispersions, suspensions or emulsions, as well as sterile powders for reconstitution into sterile injectable solutions or dispersions just prior to use. Examples of suitable aqueous and nonaqueous carriers, diluents, solvents, or vehicles include water, ethanol, polyols (such as glycerol, propylene glycol, polyethylene glycol and the like), carboxymethylcellulose and suitable mixtures thereof, vegetable oils (such as olive oil) and injectable organic esters such as ethyl oleate. In an aspect, a pharmaceutical carrier employed can be a solid, liquid, or gas. In an aspect, examples of solid carriers can include lactose, terra alba, sucrose, talc, gelatin, agar, pectin, acacia, magnesium stearate, and stearic acid. In an aspect, examples of liquid carriers can include sugar syrup, peanut oil, olive oil, and water. In an aspect, examples of gaseous carriers can include carbon dioxide and nitrogen. In preparing a disclosed composition for oral dosage form, any convenient pharmaceutical media can be employed. For example, water, glycols, oils, alcohols, flavoring agents, preservatives, coloring agents and the like can be used to form oral liquid preparations such as suspensions, elixirs and solutions; while carriers such as starches, sugars, microcrystalline cellulose, diluents, granulating agents, lubricants, binders, disintegrating agents, and the like can be used to form oral solid preparations such as powders, capsules and tablets. Because of their ease of administration, tablets and capsules are the preferred oral dosage units whereby solid pharmaceutical carriers are employed. Optionally, tablets can be coated by standard aqueous or nonaqueous techniques. Proper fluidity can be maintained, for example, by the use of coating materials such as lecithin, by the maintenance of the required particle size in the case of dispersions and by the use of surfactants. These compositions can also contain adjuvants such as preservatives, wetting agents, emulsifying agents and dispersing agents. Prevention of the action of microorganisms can be ensured by the inclusion of various antibacterial and antifungal agents such as paraben, chlorobutanol, phenol, sorbic acid and the like. It can also be desirable to include isotonic agents such as sugars, sodium chloride and the like. Prolonged absorption of the injectable pharmaceutical form can be brought about by the inclusion of agents, such as aluminum monostearate and gelatin, which delay absorption. Injectable depot forms are made by forming microencapsule matrices of the drug in biodegradable polymers such as polylactide-polyglycolide, poly(orthoesters) and poly(anhydrides). Depending upon the ratio of drug to polymer and the nature of the particular polymer employed, the rate of drug release can be controlled. Depot injectable formulations are also prepared by entrapping the drug in liposomes or microemulsions that are compatible with body tissues. The injectable formulations can be sterilized, for example, by filtration through a bacterial-retaining filter or by incorporating sterilizing agents in the form of sterile solid compositions which can be dissolved or dispersed in sterile water or other sterile injectable media just prior to use. Suitable inert carriers can include sugars such as lactose. Desirably, at least 95% by weight of the particles of the active ingredient have an effective particle size in the range of 0.01 to 10 micrometers.

[0040] As used herein, the term “excipient” refers to an inert substance which is commonly used as a diluent, vehicle, preservative, binder, or stabilizing agent, and includes, but is not limited to, proteins (e.g., serum albumin, etc.), amino acids (e.g., aspartic acid, glutamic acid, lysine, arginine, glycine, histidine, etc.), fatty acids and phospholipids (e.g., alkyl sulfonates, caprylate, etc.), surfactants (e.g., SDS, polysorbate, nonionic surfactant, etc.), saccharides (e.g., sucrose, maltose, trehalose, etc.) and polyols (e.g., mannitol, sorbitol, etc.). See, also, for reference, Remington's Pharmaceutical Sciences, (1990) Mack Publishing Co., Easton, Pa., which is hereby incorporated by reference in its entirety.

[0041] A “transposon” is a mobile genetic element that efficiently moves between vectors and chromosomes using the “cut and paste” or “copy and paste” mechanism. During transposase transposition (for example, PB transposase in the PiggyBac transposon system) recognizes transposon-specific sequences of inverted terminal repeats (ITRs) located at both ends of the transposon (there are 5′- and 3′-ITRs in any transposon system), it moves the contents from source sites and embeds them in chromosomal sites, such as TTAA chromosomal sites. In an aspect, the powerful activity of the PiggyBac transposon system makes it easy to transfer genes of interest located between two ITRs to target genomes. The transposon can be divided into Class I transposon (retrotransposon) and Class II transposon (DNA transposon). In Class I transposon, after RNA is transcribed from nucleic acid in a cell or from transposon DNA on the animal genome, the DNA reverse-transcribed from the RNA is transferred to another location on the animal genome. It works by inserting it. Class II transposon cuts nucleic acid in cells or transposon DNA on the animal genome, and then inserts the cut transposon DNA into another location on the animal genome. The Class II transposon may include a first polynucleotide at a 5′ end, a second polynucleotide at a 3′ end, and a third polynucleotide. The first polynucleotide and the second polynucleotide may include an inverted terminal repeat (ITR) sequence. The third polynucleotide may be located between the first polynucleotide and the second polynucleotide. The third polynucleotide may include an exo-polynucleotide. The third polynucleotide may include a polynucleotide encoding a transposase. Unless otherwise specified below, the term “transposon” assumes the case of Class II transposon, but even if the term “transposon” is interpreted as Class I transposon, it is technically If there is no problem, it will not be necessary to limit the interpretation to Class II transposon.

[0042] As used herein, “concurrently” means (1) simultaneously in time, or (2) at different times during the course of a common treatment schedule.

[0043] The term “contacting” as used herein refers to bringing one or more of the disclosed chimeric fusion proteins, the disclosed isolated nucleic acid molecules, the disclosed vectors, the disclosed cells, the disclosed pharmaceutical formulations, the disclosed anti-chemokines, the disclosed anti-cancer agents, the disclosed chemotherapeutics, or any combination thereof together with a target area or intended target area in such a manner that the disclosed chimeric fusion proteins, the disclosed isolated nucleic acid molecules, the disclosed vectors, the disclosed cells, the disclosed pharmaceutical formulations, the disclosed anti-chemokines, the disclosed anti-cancer agents, the disclosed chemotherapeutics, or any combination thereof can exert an effect on the intended target or targeted area either directly or indirectly. A target area or intended target area can be one or more of a subject's organs (e.g., lungs, heart, liver, kidney, brain, etc.) hosting cancerous cells. In an aspect, a target area or intended target area can be any cell or any organ infected by a disease or disorder (such as a hematological cancer). In an aspect, a target area or intended target area can be any organ, tissue, or cells that are affected by a disease or disorder (such as a hematological cancer). In an aspect, a target or intended target can be a blood-borne cancer or a hematologic cancer.

[0044] As used herein, “determining” can refer to measuring or ascertaining the presence and severity of a disease or disorder, such as, for example, a hematologic cancer. Methods and techniques used to determine the presence and/or severity of a disease or disorder are typically known to the medical arts. For example, the art is familiar with the ways to identify and/or diagnose the presence, severity, or both of a disease or disorder (such as, for example, cancer).

[0045] As used herein, “effective amount” and “amount effective” can refer to an amount that is sufficient to achieve the desired result such as, for example, the treatment and/or prevention of a disease or disorder (e.g., a hematological cancer) or a suspected disease or disorder (e.g., a hematological cancer). As used herein, the terms “effective amount” and “amount effective” can refer to an amount that is sufficient to achieve the desired an effect on an undesired condition (e.g., a hematological cancer). For example, a “therapeutically effective amount” refers to an amount that is sufficient to achieve the desired therapeutic result or to have an effect on undesired symptoms, but is generally insufficient to cause adverse side effects. In an aspect, “therapeutically effective amount” means an amount the disclosed chimeric fusion proteins, the disclosed isolated nucleic acid molecules, the disclosed vectors, the disclosed cells, the disclosed pharmaceutical formulations, the disclosed anti-chemokines, the disclosed anti-cancer agents, the disclosed chemotherapeutics, or any combination thereof that (i) treats the particular disease, condition, or disorder (e.g., a hematological cancer), (ii) attenuates, ameliorates, or eliminates one or more symptoms of the particular disease, condition, or disorder e.g., a hematological cancer), or (iii) delays the onset of one or more symptoms of the particular disease, condition, or disorder described herein (e.g., a hematological cancer). The specific therapeutically effective dose level for any particular patient will depend upon a variety of factors including the disorder being treated and the severity of the disorder; one or more of the disclosed chimeric fusion proteins, the disclosed isolated nucleic acid molecules, the disclosed vectors, the disclosed cells, the disclosed pharmaceutical formulations, or any combination thereof employed; the disclosed methods employed; the age, body weight, general health, sex and diet of the patient; the time of administration; the route of administration; the rate of excretion of one or more of the disclosed chimeric fusion proteins, the disclosed isolated nucleic acid molecules, the disclosed vectors, the disclosed cells, the disclosed pharmaceutical formulations, or any combination thereof employed; the duration of the treatment; drugs used in combination or coincidental with the one or more of the disclosed chimeric fusion proteins, the disclosed isolated nucleic acid molecules, the disclosed vectors, the disclosed cells, the disclosed pharmaceutical formulations, or any combination thereof employed, and other like factors well known in the medical arts. For example, it is well within the skill of the art to start doses of the disclosed chimeric fusion proteins, the disclosed isolated nucleic acid molecules, the disclosed vectors, the disclosed cells, the disclosed pharmaceutical formulations, the disclosed anti-chemokines, the disclosed anti-cancer agents, the disclosed chemotherapeutics, or any combination thereof at levels lower than those required to achieve the desired therapeutic effect and to gradually increase the dosage until the desired effect is achieved. If desired, then the effective daily dose can be divided into multiple doses for purposes of administration. Consequently, a single dose of the disclosed chimeric fusion proteins, the disclosed isolated nucleic acid molecules, the disclosed vectors, the disclosed cells, the disclosed pharmaceutical formulations, the disclosed anti-chemokines, the disclosed anti-cancer agents, the disclosed chemotherapeutics, or any combination thereof can contain such amounts or submultiples thereof to make up the daily dose. The dosage can be adjusted by the individual physician in the event of any contraindications. Dosage can vary, and can be administered in one or more dose administrations daily, for one or several days. Guidance can be found in the literature for appropriate dosages for given classes of pharmaceutical products. In further various aspects, a preparation can be administered in a “prophylactically effective amount”; that is, an amount effective for prevention of a disease or condition, such as, for example, a hematological cancer.

[0046] The term “antibody” (Ab) includes, without limitation, a glycoprotein immunoglobulin that binds specifically to an antigen. An antibody can comprise at least two heavy (H) chains and two light (L) chains interconnected by disulfide bonds, or an antigen-binding molecule thereof. Each H chain can comprise a heavy chain variable region (abbreviated herein as VH) and a heavy chain constant region. The heavy chain constant region can comprise three constant domains, CH1, CH2 and CH3. Each light chain can comprise a light chain variable region (abbreviated herein as VL) and a light chain constant region. The light chain constant region can comprise one constant domain, CL. The VH and VL regions can be further subdivided into regions of hypervariability, termed complementarity determining regions (CDRs), interspersed with regions that are more conserved, termed framework regions (FR). Each VH and VL can comprise three CDRs and four FRs, arranged from amino-terminus to carboxy-terminus in the following order: FR1, CDR1, FR2, CDR2, FR3, CDR3, and FR4. The variable regions of the heavy and light chains can contain a binding domain that interacts with an antigen. The constant regions of the Abs can mediate the binding of the immunoglobulin to host tissues or factors, including various cells of the immune system (e.g., effector cells) and the first component (C1q) of the classical complement system. Generally, human antibodies can be approximately 150 kD tetrameric agents composed of two identical heavy (H) chain polypeptides (about 50 kD each) and two identical light (L) chain polypeptides (about 25 kD each) that associate with each other into what is commonly referred to as a “Y-shaped” structure. The heavy and light chains can be linked or connected to one another by a single disulfide bond and two other disulfide bonds can connect the heavy chain hinge regions to one another, so that the dimers can be connected to one another and the tetramer can be formed. Naturally produced antibodies are also glycosylated, e.g., on the CH₂ domain. The term “antibody” is used to mean an immunoglobulin molecule that recognizes and specifically binds to a target, such as a protein, polypeptide, peptide, carbohydrate, polynucleotide, lipid, or combinations of the foregoing etc., through at least one antigen recognition site within the variable region of the immunoglobulin molecule. As used herein, the term encompasses intact polyclonal antibodies, intact monoclonal antibodies, antibody fragments (such as Fab, Fab′, F(ab′)2, and Fv fragments), single chain Fv (scFv) mutants, multispecific antibodies such as bispecific antibodies generated from at least two intact antibodies, fusion proteins comprising an antibody portion, and any other modified immunoglobulin molecule comprising an antigen recognition site so long as the antibodies exhibit the desired biological activity. An antibody can be of any the five major classes of immunoglobulins: IgA, IgD. IgE, IgG, and IgM, or subclasses (isotypes) thereof (e.g., IgG1. IgG2, IgG3. IgG4, IgA1 and IgA2), based on the identity of their heavy-chain constant domains referred to as alpha, delta, epsilon, gamma, and mu, respectively. The different classes of immunoglobulins have different and well-known subunit structures and three-dimensional configurations. Antibodies can be naked or conjugated to other molecules such as toxins, radioisotopes, etc.

[0047] The term “variable region” or “variable domain” is used interchangeably. The variable region typically refers to a portion of an antibody, generally, a portion of a light or heavy chain, typically about the amino-terminal 110 to 120 amino acids in the mature heavy chain and about 90 to 115 amino acids in the mature light chain, which differ extensively in sequence among antibodies and are used in the binding and specificity of a particular antibody for its particular antigen. The variability in sequence is concentrated in those regions called complementarity determining regions (CDRs) while the more highly conserved regions in the variable domain are called framework regions (FR). Without wishing to be bound by any particular mechanism or theory, it is believed that the CDRs of the light and heavy chains are primarily responsible for the interaction and specificity of the antibody with antigen. In an aspect, the variable region can be a human variable region. In an aspect, the variable region comprises rodent or murine CDRs and human framework regions (FRs). In an aspect, the variable region is a primate (e.g., non-human primate) variable region. In an aspect, the variable region comprises rodent or murine CDRs and primate framework regions (FRs).

[0048] The terms “VL” and “VL domain” are used interchangeably to refer to the light chain variable region of an antibody or an antigen-binding molecule thereof. The terms “VH” and “VH domain” are used interchangeably to refer to the heavy chain variable region of an antibody or an antigen-binding molecule thereof.

[0049] As used herein, “conjugate” or “conjugated” can be used to define the operative association of one disclosed component to another disclosed component. In an aspect, conjugated does not intend to refer solely to any type of operative association and is not particularly limited to chemical “conjugation”.

[0050] As known to the skilled person, IgG can bind to cell surface receptors on many types of cells to bring about an assortment of effects, for example, (i) the enabling of phagocytosis (e.g., monocytes, macrophages, neutrophils), (ii) antibody-dependent cellular cytotoxicity (monocytes, macrophages and lymphocytes), or (iii) to effect feedback control on antibody synthesis (B and T lymphocytes). In an aspect, the properties of the IgG subclasses can very, and in most cases the Fc fragments can have the same property as the intact IgG; meaning that it does not appear to be modulated by the hinge or the Fab. In an aspect, cellular Fc receptors can be classified into three categories according to structure and affinity. All the sites on IgG that can interact with these separate receptors appear to be located in the Fc region, and, in the case of the FcγRI (which is the highest affinity receptor class), the site involves residues 233-237, at the N-terminal end of the Cγ2 domain close to the hinge region but coded in the Cγ2 exon.

[0051] “Endogenous” with reference to a gene, protein, and/or nucleic acid refers to the natural presence of that gene, protein, and/or nucleic acid in a cell, such as an immune cell.

[0052] “Exogenous” refers to an introduced agent, such as a nucleic acid, gene, or protein, into a cell, for example from an outside source. A nucleic acid introduced into a cell is exogenous even if it encodes a protein which is naturally found in the cell. Such exogenous introduction of a nucleic acid encoding a protein can be used to increase the expression of the protein over the level that would naturally be found in the cell under similar conditions, e.g., without introduction of the exogenous nucleic acid.

[0053] A “T cell receptor” or “TCR” refers to antigen-recognition molecules present on the surface of T cells. During normal T cell development, each of the four TCR genes, a, 0, y, and 6, may rearrange leading to highly diverse TCR proteins.

[0054] As used herein, “effector function” can refer to a biological result of interaction of an antibody Fc region with an Fc receptor or ligand. Effector functions comprise, without limitation, antibody-dependent cell-mediated cytotoxicity (ADCC), antibody-dependent cell-mediated phagocytosis (ADCP), and complement mediated cytotoxicity (CMC). An effector function may be antigen binding dependent, antigen binding independent, or both. ADCC refers to lysis of antibody-bound target cells by immune effector cells. Without wishing to be bound by any theory, ADCC is generally understood to involve Fc receptor (FcR)-bearing effector cells recognizing and subsequently killing antibody-coated target cells (e.g., cells that express on their surface antigens to which an antibody is bound). Effector cells that mediate ADCC may comprise immune cells, comprising yet not limited to, one or more of natural killer (NK) cells, macrophages, neutrophils, eosinophils.

[0055] The term “immunotherapy” refers to the treatment of a subject afflicted with, or at risk of contracting or suffering a recurrence of, a disease by a method comprising inducing, enhancing, suppressing or otherwise modifying an immune response. Examples of immunotherapy can include, but are not limited to, NK cells and T cell therapies. T cell therapy can include adoptive T cell therapy, tumor-infiltrating lymphocyte (TIL) immunotherapy, autologous cell therapy, engineered autologous cell therapy (eACTTM), and allogeneic T cell transplantation. However, one of skill in the art would recognize that the conditioning methods disclosed herein would enhance the effectiveness of any transplanted T cell therapy. The T cells or NK cells of the immunotherapy can come from any source known in the art. For example, T cells and NK cells can be differentiated in vitro from a hematopoietic stem cell population (for example iPSCs) or can be obtained from a subject. T cells and NK cells can be obtained from, e.g., peripheral blood mononuclear cells (PBMCs), bone marrow, lymph node tissue, cord blood, thymus tissue, tissue from a site of infection, ascites, pleural effusion, spleen tissue, and tumors. In addition, the T cells can be derived from one or more T cell lines available in the art. T cells can also be obtained from a unit of blood collected from a subject using techniques known to the skilled person.

[0056] As used herein, the term “humanized antibody” refers to forms of non-human (e.g., murine) antibodies that are specific immunoglobulin chains, chimeric immunoglobulins, or fragments thereof that contain minimal non-human sequences. Typically, humanized antibodies are human immunoglobulins in which residues from the complementary determining region (CDR) are replaced by residues from the CDR of a non-human species (e.g., mouse, rat, rabbit, hamster, etc.) that have the desired specificity, affinity, and capability. In some instances, the Fv framework region (FR) residues of a human immunoglobulin are replaced with the corresponding residues in an antibody from a non-human species that has the desired specificity, affinity, and capability. The humanized antibody can be further modified by the substitution of additional residue either in the Fv framework region and/or within the replaced non-human residues to refine and optimize antibody specificity, affinity, and/or capability. In general, the humanized antibody will comprise substantially all of at least one, and typically two or three, variable domains containing all or substantially all of the CDR regions that correspond to the non-human immunoglobulin whereas all or substantially all of the FR regions are those of a human immunoglobulin consensus sequence. The humanized antibody can also comprise at least a portion of an immunoglobulin constant region or domain (Fc), typically that of a human immunoglobulin.

[0057] That an antibody “selectively binds” or “specifically binds” to an epitope or receptor means that the antibody reacts or associates more frequently, more rapidly, with greater duration, with greater affinity, or with some combination of the above to the epitope or receptor than with alternative substances, including unrelated proteins. “Selectively binds” or “specifically binds” means, for instance, that an antibody binds to a protein with a KD of about 0.1 mM or less, more usually about 1 M or less. “Selectively binds” or “specifically binds” means at times that an antibody binds to a protein with a KD of about 0.1 mM or less, at times about 1 M or less, at times about 0.1 M or less, at times about 0.01 M or less, and at times about 1 nM or less. It is understood that, in an aspect, an antibody or binding moiety that specifically binds to a first target may or may not specifically bind to a second target. As such, “specific binding” does not necessarily require (although it can include) exclusive binding, e.g., binding to a single target.

[0058] A “target” or “target antigen” is any molecule bound by a binding motif (e.g., a PS-expressing hematological cancer cell). A disclosed target can be cells and/or tissues in a subject.

[0059] “Antigen-specific targeting region” (ASTR) refers to the region of a disclosed chimeric fusion protein that targets specific antigens. In an aspect, the antigen-specific targeting regions comprise an antibody or a functional equivalent thereof or a fragment thereof or a derivative thereof and each of the targeting regions target a different antigen. The targeting regions may comprise full length heavy chain, Fab fragments, single chain Fv (scFv) fragments, divalent single chain antibodies or diabodies, each of which are specific to the target antigen.

[0060] The term “autologous” refers to any material derived from the same individual to which it is later to be re-introduced. For example, a subject's own cells can be obtained, made to express one or more disclosed CARs, and then administered to the same subject.

[0061] As used herein, “RNA therapeutics” can refer to the use of oligonucleotides to target RNA. RNA therapeutics can offer the promise of uniquely targeting the precise nucleic acids involved in a particular disease with greater specificity, improved potency, and decreased toxicity. This could be particularly powerful for genetic diseases where it is most advantageous to aim for the RNA as opposed to the protein. In an aspect, a therapeutic RNA can comprise one or more expression sequences. As known to the art, expression sequences can comprise an RNAi, shRNA, mRNA, non-coding RNA (ncRNA), an antisense such as an antisense RNA, miRNA, morpholino oligonucleotide, peptide-nucleic acid (PNA) or ssDNA (with natural, and modified nucleotides, including but not limited to, LNA, BNA, 2′-O-Me-RNA, 2′-MEO-RNA, 2′-F-RNA), or analog or conjugate thereof. In an aspect, a disclosed therapeutic RNA can comprise one or more long non-coding RNA (lncRNA), such as, for example, a long intergenic non-coding RNA (lincRNA), pre-transcript, pre-miRNA, pre-mRNA, competing endogenous RNA (ceRNA), small nuclear RNA (snRNA), small nucleolar RNA (snoRNA), pseudo-gene, rRNA, or tRNA. In an aspect, ncRNA can be piwi-interacting RNA (piRNA), primary miRNA (pri-miRNA), or premature miRNA (pre-miRNA). In an aspect, a disclosed therapeutic RNA or an RNA therapeutic can comprise antisense oligonucleotides (ASOs) that inhibit mRNA translation, oligonucleotides that function via RNA interference (RNAi) pathway, RNA molecules that behave like enzymes (ribozymes), RNA oligonucleotides that bind to proteins and other cellular molecules, and ASOs that bind to mRNA and form a structure that is recognized by RNase H resulting in cleavage of the mRNA target. In an aspect, RNA therapeutics can comprise RNAi and ASOs that inhibit mRNA translation. Generally speaking, as known to the art, RNAi operates sequence specifically and post-transcriptionally by activating ribonucleases which, along with other enzymes and complexes, coordinately degrade the RNA after the original RNA target has been cut into smaller pieces while antisense oligonucleotides bind to their target nucleic acid via Watson-Crick base pairing, and inhibit or alter gene expression via steric hindrance, splicing alterations, initiation of target degradation, or other events.

[0062] As used herein, the terms “cancer” and “cancerous” refer to or describe the physiological condition in mammals in which a population of cells are characterized by unregulated cell growth. Examples of cancer include, but are not limited to, carcinoma, lymphoma, blastoma, sarcoma, and leukemia. More particular examples of such cancers include squamous cell cancer, small-cell lung cancer, non-small cell lung cancer, adenocarcinoma of the lung, squamous carcinoma of the lung, cancer of the peritoneum, hepatocellular cancer, gastrointestinal cancer, pancreatic cancer, glioblastoma, cervical cancer, ovarian cancer, liver cancer, bladder cancer, hepatoma, breast cancer, colon cancer, colorectal cancer, endometrial or uterine carcinoma, salivary gland carcinoma, kidney cancer, liver cancer, prostate cancer, vulval cancer, thyroid cancer, hepatic carcinoma and various types of head and neck cancer.

[0063] The terms “proliferative disorder” and “proliferative disease” refer to disorders associated with abnormal cell proliferation such as cancer.

[0064] “Tumor” and “neoplasm” as used herein refer to any mass of tissue that result from excessive cell growth or proliferation, either benign (noncancerous) or malignant (cancerous) including pre-cancerous lesions.

[0065] “Metastasis” as used herein refers to the process by which a cancer spreads or transfers from the site of origin to other regions of the body with the development of a similar cancerous lesion at the new location. A “metastatic” or “metastasizing” cell is one that loses adhesive contacts with neighboring cells and migrates via the bloodstream or lymph from the primary site of disease to invade neighboring body structures.

[0066] The terms “cancer stem cell” or “tumor stem cell” or “solid tumor stem cell” are used interchangeably herein and refer to a population of cells from a solid tumor that: (1) have extensive proliferative capacity; (2) are capable of asymmetric cell division to generate one or more kinds of differentiated progeny with reduced proliferative or developmental potential; and (3) are capable of symmetric cell divisions for self-renewal or self-maintenance. These properties of “cancer stem cells” or “tumor stem cells” or “solid tumor stem cells” confer on those cancer stem cells the ability to form palpable tumors upon serial transplantation into an immunocompromised mouse compared to the majority of tumor cells that fail to form tumors. Cancer stem cells undergo self-renewal versus differentiation in a chaotic manner to form tumors with abnormal cell types that can change over time as mutations occur.

[0067] The terms “cancer cell” or “tumor cell” and grammatical equivalents refer to the total population of cells derived from a tumor including both non-tumorigenic cells, which comprise the bulk of the tumor cell population, and tumorigenic stem cells (cancer stem cells).

[0068] As used herein “tumorigenic” refers to the functional features of a solid tumor stem cell including the properties of self-renewal (giving rise to additional tumorigenic cancer stem cells) and proliferation to generate all other tumor cells (giving rise to differentiated and thus non-tumorigenic tumor cells) that allow solid tumor stem cells to form a tumor.

[0069] As used herein, the “tumorigenicity” of a tumor refers to the ability of a random sample of cells from the tumor to form palpable tumors upon serial transplantation into immunocompromised mice.

[0070] As used herein, “lipid nanoparticles” or “LNPs” can deliver nucleic acid (e.g., DNA or RNA), protein (e.g., RNA-guided DNA binding agent), or nucleic acid together with protein. LNPs can comprise biodegradable, ionizable lipids. For example, LNPs can comprise (9Z,12Z)-3-((4,4-bis(octyloxy)butanoyl)oxy)-2-((((3-(diethylamino)propoxy)carbonyl)oxy)methyl)propyl octadeca-9,12-dienoate, also called 3-((4,4-bis(octyloxy)butanoyl)oxy)-2-((((3-(diethylamino)propoxy)carbonyl)oxy)methyl)propyl (9Z,12Z)-octadeca-9,12-dienoate) or another ionizable lipid. In an aspect, the term cationic and ionizable in the context of LNP lipids can be used interchangeably, e.g., wherein ionizable lipids are cationic depending on the pH.

[0071] “Sequence identity” and “sequence similarity” can be determined by alignment of two peptide or two nucleotide sequences using global or local alignment algorithms. Sequences may then be referred to as “substantially identical” or “essentially similar” when they are optimally aligned. For example, sequence similarity or identity can be determined by searching against databases such as FASTA, BLAST, etc., but hits should be retrieved and aligned pairwise to compare sequence identity. Two proteins or two protein domains, or two nucleic acid sequences can have “substantial sequence identity” if the percentage sequence identity is at least 70%, 75%, 80%, 85%, 90%, 95%, 98%, 99% or more, preferably 90%, 95%, 98%, 99% or more. Such sequences are also referred to as “variants” herein, e.g., other variants of a missing, deficient, and/or mutant protein or enzyme. It should be understood that sequence with substantial sequence identity do not necessarily have the same length and may differ in length. For example, sequences that have the same nucleotide sequence but of which one has additional nucleotides on the 3″- and/or 5″-side are 100% identical.

[0072] As used herein, “immune-modulating” refers to the ability of one or more of the disclosed chimeric fusion proteins, the disclosed isolated nucleic acid molecules, the disclosed vectors, the disclosed cells, the disclosed pharmaceutical formulations, or a combination thereof to alter (modulate) one or more aspects of the immune system. The immune system functions to protect the organism from infection and from foreign antigens by cellular and humoral mechanisms involving lymphocytes, macrophages, and other antigen-presenting cells that regulate each other by means of multiple cell-cell interactions and by elaborating soluble factors, including lymphokines and antibodies, that have autocrine, paracrine, and endocrine effects on immune cells.

[0073] As used herein, “immune modulator” refers to an agent that is capable of adjusting a given immune response to a desired level (e.g., as in immunopotentiation, immunosuppression, or induction of immunologic tolerance). Examples of immune modulators include but are not limited to, a disclosed immune modulator can comprise aspirin, azathioprine, belimumab, betamethasone dipropionate, betamethasone valerate, bortezomib, bredinin, cyazathioprine, cyclophosphamide, cyclosporine, deoxyspergualin, didemnin B, fluocinolone acetonide, folinic acid, ibuprofen, IL6 inhibitors (such as sarilumab) indomethacin, inebilizumab, intravenous gamma globulin (IVIG), methotrexate, methylprednisolone, mycophenolate mofetil, naproxen, prednisolone, prednisone, prednisolone indomethacin, rapamycin, rituximab, sirolimus, sulindac, synthetic vaccine particles containing rapamycin (SVP-Rapamycin or ImmTOR), thalidomide, tocilizumab, tolmetin, triamcinolone acetonide, anti-CD3 antibodies, anti-CD4 antibodies, anti-CD19 antibodies, anti-CD20 antibodies, anti-CD22 antibodies, anti-CD40 antibodies, anti-FcRN antibodies, anti-IL6 antibodies, anti-IGF1R antibodies, an IL2 mutein, a BTK inhibitor, or a combination thereof. In an aspect, a disclosed immune modulator can comprise one or more Treg (regulatory T cells) infusions (e.g., antigen specific Treg cells to AAV). In an aspect, a disclosed immune modulator can be bortezomib or SVP-Rapamycin. In an aspect, an immune modulator can be administered by any suitable route of administration including, but not limited to, in utero, intra-CSF, intrathecally, intravenously, subcutaneously, transdermally, intradermally, intramuscularly, orally, transcutaneously, intraperitoneally (IP), or intravaginally. In an aspect, a disclosed immune modulator can be administered using a combination of routes. Administration can also include hepatic intra-arterial administration or administration through the hepatic portal vein (HPV). Administration of an immune modulator can be continuous or intermittent, and administration can comprise a combination of one or more routes.

[0074] As used herein, the term “package insert” is used to refer to instructions customarily included in commercial packages of therapeutic products, that contain information about the indications, usage, dosage, administration, contraindications and/or warnings concerning the use of such therapeutic products.

[0075] As used herein, the term “in combination” in the context of the administration of other therapies (e.g., other agents) includes the use of more than one therapy (e.g., drug therapy). Administration “in combination with” one or more further therapeutic agents includes simultaneous (e.g., concurrent) and consecutive administration in any order. The use of the term “in combination” does not restrict the order in which therapies are administered to a subject. By way of non-limiting example, a first therapy (e.g., one or more of the disclosed chimeric fusion proteins, the disclosed isolated nucleic acid molecules, the disclosed vectors, the disclosed cells, the disclosed pharmaceutical formulations, or a combination thereof) can be administered prior to (e.g., 1 minute, 15 minutes, 30 minutes, 45 minutes, 1 hour, 2 hours, 3 hours, 4 hours, 5 hours, 6 hours, 7 hours, 8 hours, 12 hours, 24 hours, 48 hours, 72 hours, 96 hours, 1 week, 2 weeks, 3 weeks, 4 weeks, 5 weeks, 6 weeks, 8 weeks, 8 weeks, 9 weeks, 10 weeks, 11 weeks, or 12 weeks), concurrently, or after (e.g., 1 minute, 15 minutes, 30 minutes, 45 minutes, 1 hour, 2 hours, 3 hours, 4 hours, 5 hours, 6 hours, 7 hours, 8 hours, 12 hours, 24 hours, 48 hours, 72 hours, 96 hours, 1 week, 2 weeks, 3 weeks, 4 weeks, 5 weeks, 6 weeks, 7 weeks, 8 weeks, 9 weeks, 10 weeks, 11 weeks, or 12 weeks or longer) the administration of a second therapy to a subject having or diagnosed with hematological cancer.

[0076] Disclosed are the components to be used to prepare the disclosed isolated nucleic acid molecules, disclosed vectors, or disclosed pharmaceutical formulations as well as the disclosed isolated nucleic acid molecules, disclosed vectors, or disclosed pharmaceutical formulations used within the methods disclosed herein. These and other materials are disclosed herein, and it is understood that when combinations, subsets, interactions, groups, etc. of these materials are disclosed that while specific reference of each various individual and collective combinations and permutation of these compounds cannot be explicitly disclosed, each is specifically contemplated and described herein. For example, if a particular compound is disclosed and discussed and a number of modifications that can be made to a number of molecules including the compounds are discussed, specifically contemplated is each and every combination and permutation of the compound and the modifications that are possible unless specifically indicated to the contrary. Thus, if a class of molecules A, B, and C are disclosed as well as a class of molecules D, E, and F and an example of a combination molecule, A-D is disclosed, then even if each is not individually recited each is individually and collectively contemplated meaning combinations, A-E, A-F, B-D, B-E, B-F, C-D, C-E, and C-F are considered disclosed. Likewise, any subset or combination of these is also disclosed. Thus, for example, the sub-group of A-E, B-F, and C-E would be considered disclosed. This concept applies to all aspects of this application including, but not limited to, steps in methods of making and using the compositions of the invention. Thus, if there are a variety of additional steps that can be performed it is understood that each of these additional steps can be performed with any specific claimed compositions and/or claimed methods.

### B. Hematological Cancers

[0077] Hematologic cancers begin in the cells of the immune system or in blood-forming tissue, such as the bone marrow. Common types of hematologic cancer include lymphoma, myeloma, and leukemia. Myeloid neoplasms include acute myeloid leukemia (AML) and related neoplasms, myeloproliferative neoplasms (Ph negative) and chronic myeloid leukemia, myelodysplastic syndromes (MDS), and myeloproliferative/myelodysplastic syndromes.

[0078] Acute myeloid leukemia (AML) and related neoplasms include AML with recurrent genetic abnormalities, AML with myelodysplasia-related changes, therapy-related AML, AML, not otherwise specified, and acute leukemias of ambiguous lineage.

[0079] Myeloproliferative neoplasms (Ph negative) and chronic myeloid leukemia include essential thrombocythemia, polycythemia vera, primary myelofibrosis, systemic mastocytosis, chronic myeloid leukemia, chronic neutrophilic leukemia, and chronic eosinophilic leukemia. Myelodysplastic syndromes (MDS) include refractory anemia with ringed sideroblasts, refractory cytopenia with multilineage dysplasia, refractory anemia with excess blasts (type I), refractory anemia with excess blasts (type 2), MDS with isolated del (5q), and MDS (unclassifiable). Myeloproliferative/myelodysplatic include chronic myelomonocytic leukemia, atypical chronic myeloid leukemia, juvenile myelomonocytic leukemia, myeloproliferative/myelodysplatic syndromes (unclassifiable)).

[0080] Lymphoid neoplasms include precursor lymphoid neoplasms, mature B-cell neoplasms, and Hodgkin lymphoma. Precursor lymphoid neoplasms include B lymphoblastic leukemia/lymphoma and T lymphoblastic leukemia/lymphoma.

[0081] Mature B-cell neoplasms include diffuse large B-cell lymphoma, primary central nervous system lymphoma, primary mediastinal B-cell lymphoma, Burkitt lymphoma/leukemia Follicular lymphoma, chronic lymphocytic leukemia/small lymphocytic lymphoma, B-cell prolymphocytic leukemia, lymphoplasmacytic lymphoma/Waldenstrom macroglobulinemia, mantle cell lymphoma, marginal zone lymphomas, post-transplant lymphoproliferative disorders, HIV-associated lymphomas, primary effusion lymphoma, intravascular large B-cell lymphoma, primary cutaneous B-cell lymphoma, and hairy cell leukemia.

[0082] Mature B-cell neoplasms include multiple myeloma and multiple myeloma includes monoclonal gammopathy of unknown significance, smoldering multiple myeloma, and solitary plasmacytomas (solitary bone and extramedullary). As shown below, there are several markers for hematologic malignancies.

| Name | Normal Expression | Comments |
|---|---|---|
| CD1a | Immature T cells; Langerhans | Associated with ALL |
| | cells T cells and NK cells | |
| CD2 | T cells | May be aberrantly expressed in AML and |
| | | systemic mastocytosis |
| CD3 | T-cell subset, monocytes, | Indicates T-cell lineage |
| | histiocytes | |
| CD4 | T cells and B-cell subset | Associated with mature T-cell lymphoid |
| | | neoplasms and monocytic AML |
| CD5 | T cells and NK cells | Indicates T-cell lineage; may be expressed |
| | | aberrantly on B cells, such as CLL and |
| | | MCL |
| CD7 | Immature T cells; Langerhans | Indicator of T-cell lineage; may be |
| | cells T cells and NK cells | aberrantly expressed in AML, MDS, and |
| | | MPN |
| CD8 | T-cell subset and some NK cells | Associated with some mature T-cell |
| | | lymphoid neoplasms Associated with |
| | | precursor B-cell ALL |
| CD9 | Precursor B cells, activated T | |
| | cells, and platelets | |
| CD10 | Immature T cells and B cells, | Associated with ALL, some mature T-cell |
| | subset of mature T cells and B | neoplasms, and some mature B-cell |
| | cells, and neutrophils | neoplasms. In mature B-cell neoplasms, it |
| | | is associated with a germinal center |
| | | phenotype of FL and DLBCL. |
| CD11b | Maturing neutrophilic and | Aberrantly expressed in AML, MDS, and |
| | monocytic cells and some | MPN |
| | lymphoid cells | |
| CD11c | Subset of B cells and subset of T | Associated with HCL; occasionally with |
| | cells Myeloid and monocytic cells | CLL and MCL |
| CD13 | | Indicates neutrophilic and monocytic |
| | | lineage. Associated with myeloid |
| | | neoplasms; may be aberrantly expressed in |
| | | B-cell neoplasms, MDS, and MPN. |
| CD14 | Monocytes | Associated with monocytic AML |
| CD15 | Myeloid and monocytic cells | May be aberrantly expressed in AML, |
| | | MDS, and MPD |
| CD16 | NK cells, NK/T cells, monocytes, | Indicates NK differentiation; may be |
| | and maturing neutrophilic cells | aberrantly expressed in AML, MDS, and |
| | | MPN |
| CD19 | All B cells including | Indicates B-cell lineage |
| | lymphoblasts, mature B cells, and | |
| | most plasma cells | |
| CD20 | Mature B cells (except plasma | Indicates B-cell lineage; aberrant |
| | cells) and small subset of T cells | expression in ALL |
| CD22 | Cytoplasmic expression in early | Indicates B-cell lineage in ALL and |
| | B cells and surface expression | mature B-cell neoplasms |
| | acquired during maturation of | |
| | precursor B cells | |
| CD23 | Weak expression on resting B | Distinguishes between CD5⁺ mature B- |
| | cells; intensity increases with | lymphoid neo-plasms (e.g., CLL is |
| | activation | CD5⁺/CD23⁺ and MCL is CD5⁺/CD23⁻) |
| CD25 | Activated B cells and activated T | Associated with ATLL and HCL; variable |
| | cells | expression in other mature T-cell |
| | | neoplasms and systemic mastocytosis |
| CD26 | Immature T cells, NK cells, and | Associated with CTCL/Sézary syndrome |
| | activated T cells | |
| CD30 | Activated T cells and B cells, and | Associated with HL and ALCL |
| | monocytes | |
| CD33 | Myeloid and monocytic cells | |
| CD34 | Hematopoietic precursors, B-cell | Associated with AML and ALL blasts and |
| | and T- cell precursors and | one of the stem cell markers |
| | myeloblasts | |
| CD36 | Monocytes, erythroid cells, | When used in combination with CD64, is a |
| | megakaryocytes, and platelets | more sensitive marker of monocytic |
| | | differentiation than CD14 |
| CD38 | Precursor B cells (hematogones), | Associated with plasmacytic |
| | normal follicle center B cells, | differentiation and multiple myeloma; |
| | immature and activated T cells, | poor prognostic marker in CLL/SLL |
| | plasma cells (bright intensity), | |
| | myeloid and monocytic cells, and | |
| | erythroid precursors | |
| CD41 | Megakaryocytes and platelets | Associated with megakaryocytic |
| | | differentiation Aberrant expression in |
| | | CLL, MCL, and some MZL |
| CD43 | T cells, myeloid, monocytes, and | Associated with megakaryocytic |
| | small B-cell subset | differentiation Aberrant expression in |
| | | CLL, MCL, and some MZL |
| CD45 | All B cells and T cells; weaker | |
| | intensity on precursors and | |
| | plasma cells | |
| CD45RA | B-cell subsets, T-cell subsets, | Useful to distinguish between precursor |
| | including mostly naïve T cells | lymphoid neoplasms from mature |
| | | lymphoid neoplasms; identifies blasts in |
| | | acute leukemia |
| CD45RO | B-cell subsets, T-cell subsets, | — |
| | including mostly memory T cells | |
| CD52 | Thymocytes, T and B cells (not | — |
| | plasma cells), monocytes, | |
| | macrophages | |
| CD56 | NK cells and NK/T cells | — |
| CD58 | Leukocytes including bright- | Indicates NK differentiation; aberrant |
| | intensity staining of precursors; | expression in AML, MM, MDS, and MPN |
| | intensity decreases with | |
| | maturation | |
| CD61 | Megakaryocytes and platelets | Distinguishes ALL from normal precursor |
| | | B-cell (hematogones) including detection |
| | | of MRD |
| CD64 | Monocytes and intermediate | Associated with megakaryocytic |
| | neutrophilic precursors | differentiation |
| CD71 | Erythroid precursors, myeloid, | Identification of immature erythroid cells; |
| | activated lymphoid, and | possibly ex-pressed in MDS |
| | proliferating cells | |
| CD79a | Precursor B cells, plasma cells | Indicates B-cell lineage in ALL and |
| and | positive, variable expression | mature lymphoid neoplasms; intensity |
| CD79b | mature B cells | often differs between subtypes of mature - |
| | | cell neoplasm; may be seen in some T-cell |
| | | lymphoid neoplasms |
| CD103 | B-cell subset and intramucosal T | Associated with HCL, EATL, and some |
| | cells | MZL |
| CD117 | Immature myeloid cells and mast | Associated with myeloblasts; may be |
| | cells | aberrantly expressed MM and MGUS |
| CD123 | Monocytes, neutrophils, basophils | May be expressed with monocytic AML |
| | megakaryocytes, and | |
| | plasmacytoid dendritic cells. | |
| CD138 | Plasma cells | |
| CD163 | Monocytes and macrophages | Indicates monocytic differentiation |
| FMC-7 | B cells | Distinguishes CD5⁺ lymphoid neoplasm: |
| | | CLL is FMC-7 negative, and MCL is |
| | | FMC-7 positive. Associated with HCL. |
| Bcl-2 | T cells and some B cells; absent | Distinguishes CD10⁺ lymphoid neoplasms: |
| | on nor mal germinal center cells | FL is usually positive, BL negative, |
| | | variable in DLBCL. |
| HLA-DR | Myeloblasts, monocytes, | Associated with APL; may be aberrantly |
| | promyelocytes all B cells, and | expressed in AML, MDS, and MPN |
| | activated T cells | |
| Kappa | Mature B cells | Immunoglobulin light chain restriction in |
| and | | B cells |
| lambda | | |
| MPO | Neutrophilic and monocytic cells | Indicates myeloid differentiation; in |
| | | contrast to cytochemical stain, measures |
| | | the presence of antigen, not enzyme |
| | | activity |
| TCR | T-cell receptor on mature T cells | Used in classification of mature T-cell |
| | | neoplasms |
| TdT | B-cell and T-cell precursors | Associated with ALL and some AML |
| ZAP-70 | T cells, NK cells, precursor B | Poor prognostic marker in CLL/SLL |
| | cells | |

### C. Annexins

[0083] ANXA1 (Annexin A1) is a protein-coding gene. This gene encodes a membrane-localized protein that binds phospholipids. This protein inhibits phospholipase A2 and has anti-inflammatory activity. Loss of function or expression of this gene has been detected in multiple tumors. Diseases associated with ANXA1 include Shoulder Impingement Syndrome and Brain Edema. Among its related pathways are GPCR downstream signaling and Class A/1 (Rhodopsin-like receptors). Gene Ontology (GO) annotations related to this gene include calcium ion binding and signaling receptor binding. An important paralog of this gene is ANXA2. ANXA1 plays important roles in the innate immune response as effector of glucocorticoid-mediated responses and regulator of the inflammatory process. ANXA1 has anti-inflammatory activity. ANXA1 plays a role in glucocorticoid-mediated down-regulation of the early phase of the inflammatory response (by similarity). ANXA1 contributes to the adaptive immune response by enhancing signaling cascades that are triggered by T-cell activation, regulates differentiation and proliferation of activated T-cells. ANXA1 promotes the differentiation of T-cells into Th1 cells and negatively regulates differentiation into Th2 cells. ANXA1 has no effect on unstimulated T cells. ANXA1 negatively regulates hormone exocytosis via activation of the formyl peptide receptors and reorganization of the actin cytoskeleton. ANXA1 has high affinity for Ca(2+) and can bind up to eight Ca(2+) ions (by similarity). ANXA1 displays Ca(2+)-dependent binding to phospholipid membranes. ANXA1 plays a role in the formation of phagocytic cups and phagosomes and plays a role in phagocytosis by mediating the Ca(2+)-dependent interaction between phagosomes and the actin cytoskeleton (by similarity). ANXA1 functions at least in part by activating the formyl peptide receptors and downstream signaling cascades. ANXA1 promotes chemotaxis of granulocytes and monocytes via activation of the formyl peptide receptors and promotes rearrangement of the actin cytoskeleton, cell polarization and cell migration. ANXA1 promotes resolution of inflammation and wound healing. ANXA1 acts via neutrophil N-formyl peptide receptors to enhance the release of CXCL2.

[0084] ANXA2 (Annexin A2) is a protein coding gene. This gene encodes a member of the annexin family. Members of this calcium-dependent phospholipid-binding protein family play a role in the regulation of cellular growth and in signal transduction pathways. This protein functions as an autocrine factor which heightens osteoclast formation and bone resorption. This gene has three pseudogenes located on chromosomes 4, 9 and 10, respectively. Multiple alternatively spliced transcript variants encoding different isoforms have been found for this gene. Annexin A2 expression has been found to correlate with resistance to treatment against various cancer forms. Diseases associated with ANXA2 include Antiphospholipid Syndrome and Acute Promyelocytic Leukemia. Among its related pathways are Interleukin-12 family signaling and Innate Immune System. Gene Ontology (GO) annotations related to this gene include RNA binding and small GTPase binding. An important paralog of this gene is ANXA1. Calcium-regulated membrane-binding protein whose affinity for calcium is greatly enhanced by anionic phospholipids. It binds two calcium ions with high affinity. May be involved in heat-stress response. Inhibits PCSK9-enhanced LDLR degradation, probably reduces PCSK9 protein levels via a translational mechanism but also competes with LDLR for binding with PCSK9. ANXA2 binds M. pneumoniae CARDS toxin, probably serves as one receptor for this pathogen. When ANXA2 is down-regulated by siRNA, less toxin binds to human cells and less vacuolization (a symptom of M. pneumoniae infection) is seen.

[0085] ANXA3 (Annexin A3) is a protein coding gene. This gene encodes a member of the annexin family. Members of this calcium-dependent phospholipid-binding protein family play a role in the regulation of cellular growth and in signal transduction pathways. This protein functions in the inhibition of phospholipase A2 and cleavage of inositol 1,2-cyclic phosphate to form inositol 1-phosphate. This protein may also play a role in anti-coagulation. Diseases associated with ANXA3 include ovarian cancer and prostate cancer. Among its related pathways are prostaglandin synthesis and regulation. Gene Ontology (GO) annotations related to this gene include calcium ion binding and calcium-dependent phospholipid binding. An important paralog of this gene is ANXA11. Inhibitor of phospholipase A2, also possesses anti-coagulant properties. Also cleaves the cyclic bond of inositol 1,2-cyclic phosphate to form inositol 1-phosphate.

[0086] ANXA4 (Annexin A4) is a protein coding gene. Annexin IV (ANX4) belongs to the annexin family of calcium-dependent phospholipid binding proteins. Although their functions are still not clearly defined, several members of the annexin family have been implicated in membrane-related events along exocytotic and endocytotic pathways. ANX4 has 45 to 59% identity with other members of its family and shares a similar size and exon-intron organization. Isolated from human placenta, ANX4 encodes a protein that has possible interactions with ATP and has in vitro anticoagulant activity and also inhibits phospholipase A2 activity. ANX4 is almost exclusively expressed in epithelial cells. Several transcript variants encoding different isoforms have been found for this gene. Among its related pathways are prostaglandin synthesis and regulation. Gene Ontology (GO) annotations related to this gene include calcium ion binding and calcium-dependent protein binding. An important paralog of this gene is ANXA11. Calcium/phospholipid-binding protein which promotes membrane fusion and is involved in exocytosis.

[0087] ANXA5 (Annexin A5) is a protein coding gene. The Annexin 5 gene spans 29 kb containing 13 exons, and encodes a single transcript of approximately 1.6 kb and a protein product with a molecular weight of about 35 kDa. The protein encoded by this gene belongs to the annexin family of calcium-dependent phospholipid binding proteins some of which have been implicated in membrane-related events along exocytotic and endocytotic pathways. Annexin 5 is a phospholipase A2 and protein kinase C inhibitory protein with calcium channel activity and a potential role in cellular signal transduction, inflammation, growth and differentiation. Annexin 5 has also been described as placental anticoagulant protein I, vascular anticoagulant-alpha, endonexin II, lipocortin V, placental protein 4 and anchorin CII. Polymorphisms in this gene have been implicated in various obstetric complications. Diseases associated with ANXA5 include Pregnancy Loss, Recurrent 3 and Antiphospholipid Syndrome. Among its related pathways are Response to elevated platelet cytosolic Ca2+ and Regulation of CFTR activity (norm and CF). Gene Ontology (GO) annotations related to this gene include calcium ion binding and calcium-dependent phospholipid binding. An important paralog of this gene is ANXA4. This protein is an anticoagulant protein that acts as an indirect inhibitor of the thromboplastin-specific complex, which is involved in the blood coagulation cascade.

[0088] ANXA6 (Annexin A6) is a protein coding gene. Annexin VI belongs to a family of calcium-dependent membrane and phospholipid binding proteins. Several members of the annexin family have been implicated in membrane-related events along exocytotic and endocytotic pathways. The annexin VI gene is approximately 60 kbp long and contains 26 exons. It encodes a protein of about 68 kDa that consists of eight 68-amino acid repeats separated by linking sequences of variable lengths. It is highly similar to human annexins I and II sequences, each of which contain four such repeats. Annexin VI has been implicated in mediating the endosome aggregation and vesicle fusion in secreting epithelia during exocytosis. Alternatively spliced transcript variants have been described. Diseases associated with ANXA6 include Kwashiorkor and Malignant Hyperthermia. Among its related pathways are Cardiac conduction and Myometrial relaxation and contraction pathways. Gene Ontology (GO) annotations related to this gene include calcium ion binding and GTP binding. An important paralog of this gene is ANXA11.

[0089] ANXA7 (Annexin A7) is a protein coding gene. Annexin VII is a member of the annexin family of calcium-dependent phospholipid binding proteins. The Annexin VII gene contains 14 exons and spans approximately 34 kb of DNA. An alternatively spliced cassette exon results in two mRNA transcripts of 2.0 and 2.4 kb which are predicted to generate two protein isoforms differing in their N-terminal domain. The alternative splicing event is tissue specific and the mRNA containing the cassette exon is prevalent in brain, heart and skeletal muscle. The transcripts also differ in their 3′-non coding regions by the use of two alternative poly(A) signals. Annexin VII encodes a protein with a molecular weight of approximately 51 kDa with a unique, highly hydrophobic N-terminal domain of 167 amino acids and a conserved C-terminal region of 299 amino acids. The latter domain is composed of alternating hydrophobic and hydrophilic segments. Structural analysis of the protein suggests that Annexin VII is a membrane binding protein with diverse properties, including voltage-sensitive calcium channel activity, ion selectivity and membrane fusion. Among its related pathways are Cytoskeletal Signaling and Ca, cAMP and Lipid Signaling. Gene Ontology (GO) annotations related to this gene include RNA binding and integrin binding. An important paralog of this gene is ANXA11.

[0090] ANXA8 (Annexin A8) is a protein-coding gene. This gene encodes a member of the annexin family of evolutionarily conserved Ca2+ and phospholipid-binding proteins. The encoded protein may function as an anticoagulant that indirectly inhibits the thromboplastin-specific complex. Overexpression of this gene has been associated with acute myelocytic leukemia. A highly similar duplicated copy of this gene is found in close proximity on the long arm of chromosome 10. Diseases associated with ANXA8 include Breast Adenocarcinoma and Heterophyiasis. Gene Ontology (GO) annotations related to this gene include calcium ion binding and calcium-dependent phospholipid binding. An important paralog of this gene is ANXA8L1. This protein is an anticoagulant protein that acts as an indirect inhibitor of the thromboplastin-specific complex, which is involved in the blood coagulation cascade.

[0091] ANXA8L1 (Annexin A8 Like 1) is a protein-coding gene. Among its related pathways are Prostaglandin synthesis and regulation. Gene Ontology (GO) annotations related to this gene include calcium ion binding and calcium-dependent phospholipid binding. An important paralog of this gene is ANXA8. This gene encodes a member of the annexin family of evolutionarily conserved Ca2+ and phospholipid-binding proteins. The encoded protein may function as an anticoagulant that indirectly inhibits the thromboplastin-specific complex. Overexpression of this gene has been associated with acute myelocytic leukemia. A highly similar duplicated copy of this gene is found in close proximity on the long arm of chromosome 10.

[0092] ANXA9 (Annexin A9) is a protein coding gene. The annexins are a family of calcium-dependent phospholipid-binding proteins. Members of the annexin family contain 4 internal repeat domains, each of which includes a type II calcium-binding site. The calcium-binding sites are required for annexins to aggregate and cooperatively bind anionic phospholipids and extracellular matrix proteins. This gene encodes a divergent member of the annexin protein family in which all four homologous type II calcium-binding sites in the conserved tetrad core contain amino acid substitutions that ablate their function. However, structural analysis suggests that the conserved putative ion channel formed by the tetrad core is intact. Diseases associated with ANXA9 include Pemphigus and Acantholytic Acanthoma. Gene Ontology (GO) annotations related to this gene include calcium ion binding and phospholipid binding. An important paralog of this gene is ANXA2. Low affinity receptor for acetylcholine known to be targeted by disease-causing pemphigus vulgaris antibodies in keratinocytes.

[0093] ANXA10 (Annexin A10) is a protein coding gene. This gene encodes a member of the annexin family. Members of this calcium-dependent phospholipid-binding protein family play a role in the regulation of cellular growth and in signal transduction pathways. The function of this gene has not yet been determined. Diseases associated with ANXA10 include Hepatocellular Carcinoma. Gene Ontology (GO) annotations related to this gene include calcium ion binding and calcium-dependent phospholipid binding. An important paralog of this gene is ANXA4.

[0094] ANXA11 (Annexin A11) is a protein coding gene. This gene encodes a member of the annexin family, a group of calcium-dependent phospholipid-binding proteins. Annexins have unique N-terminal domains and conserved C-terminal domains, which contain calcium-dependent phospholipid-binding sites. The encoded protein is a 56-kD antigen recognized by sera from patients with various autoimmune diseases. Several transcript variants encoding two different isoforms have been identified. Diseases associated with ANXA11 include Amyotrophic Lateral Sclerosis 23 and Inclusion Body Myopathy 0nd Brain White Matter Abnormalities. Gene Ontology (GO) annotations related to this gene include RNA binding and calcium-dependent protein binding. An important paralog of this gene is ANXA7. Binds specifically to calcyclin in a calcium-dependent manner (By similarity). Required for midbody formation and completion of the terminal phase of cytokinesis.

[0095] ANXA13 (Annexin A13) is a protein coding gene. This gene encodes a member of the annexin family. Members of this calcium-dependent phospholipid-binding protein family play a role in the regulation of cellular growth and in signal transduction pathways. The specific function of this gene has not yet been determined; however, it is associated with the plasma membrane of undifferentiated, proliferating endothelial cells and differentiated villus enterocytes. Alternatively spliced transcript variants encoding different isoforms have been identified. Gene Ontology (GO) annotations related to this gene include calcium ion binding and phosphatidylserine binding. An important paralog of this gene is ANXA8.

### D. Compositions for Use in the Disclosed Methods

### 1. Chimeric Fusion Proteins

[0096] Disclosed herein are chimeric fusion proteins. Disclosed herein are chimeric fusion proteins comprising a phosphatidylserine (PS) binding domain. Disclosed herein is a chimeric fusion protein comprising a phosphatidylserine (PS) binding domain and an immunostimulatory domain. Disclosed herein is a chimeric fusion protein comprising a phosphatidylserine (PS) binding domain operably linked an immunostimulatory domain.

[0097] Disclosed herein is a chimeric fusion protein comprising a phosphatidylserine (PS) binding domain, a linker, and an immunostimulatory domain. Disclosed herein is a chimeric fusion protein comprising a phosphatidylserine (PS) binding domain operably linked to an immunostimulatory domain, wherein the immunostimulatory domain further comprises a conjugated small molecule. Disclosed herein are chimeric fusion proteins comprising a secretion signal and a phosphatidylserine (PS) binding domain. Disclosed herein is a chimeric fusion protein comprising a secretion signal, a phosphatidylserine (PS) binding domain, and an immunostimulatory domain. Disclosed herein is a chimeric fusion protein comprising a secretion signal and a phosphatidylserine (PS) binding domain operably linked an immunostimulatory domain. Disclosed herein is a chimeric fusion protein comprising a secretion signal, a phosphatidylserine (PS) binding domain, a linker, and an immunostimulatory domain.

[0098] Disclosed herein is a chimeric fusion protein comprising a secretion signal and a phosphatidylserine (PS) binding domain operably linked to an immunostimulatory domain, wherein the immunostimulatory domain further comprise a conjugated small molecule. Disclosed herein is a chimeric fusion protein comprising a PS-binding domain operably linked to an IgG1 Fc domain. Disclosed herein is a chimeric fusion protein comprising a PS-binding domain operably linked to an IgG1 Fc domain and an additional immunostimulatory domain. Disclosed herein is a chimeric fusion protein comprising a PS-binding domain operably linked to an IgG1 Fc domain and an additional immunostimulatory domain, wherein the additional immunostimulatory domain comprises the IgV domain of SIRPα or the extracellular domain of NKG2D protein. Disclosed herein is a chimeric fusion protein comprising a PS-binding domain operably linked to a single-chain antibody (scFV) to a human CD3 protein. Disclosed herein is a chimeric fusion protein comprising an Annexin-binding domain operably linked to a single-chain antibody (scFV) to a human CD3 protein. Disclosed herein is a chimeric fusion protein comprising a PS-binding domain operably linked to a single-chain antibody (scFV) to a human CD3 protein and one or more additional immunostimulatory domains. Disclosed herein is a chimeric fusion protein comprising an Annexin-binding domain operably linked to a single-chain antibody (scFV) to a human CD3 protein and one or more additional immunostimulatory domains.

[0099] Disclosed herein is a chimeric fusion protein comprising the sequence set forth in SEQ ID NO:85, SEQ ID NO:86, SEQ ID NO:87, SEQ ID NO:88, SEQ ID NO:89, SEQ ID NO:90, SEQ ID NO:91, SEQ ID NO:92, SEQ ID NO:93, SEQ ID NO:94, SEQ ID NO:95, SEQ ID NO:96, SEQ ID NO:97, SEQ ID NO:99, SEQ ID NO:100, SEQ ID NO:101, SEQ ID NO:106, or a fragment thereof. In an aspect, a disclosed secretion signal can be any secretion signal known to the art. In an aspect, a disclosed secretion signal can comprise the sequence set forth in SEQ ID NO:107-SEQ ID NO:108.

[0100] In an aspect, a disclosed chimeric fusion protein can be humanized or one or more humanized components.

[0101] In an aspect of a disclosed chimeric fusion protein, a disclosed phosphatidylserine (PS) binding domain can comprise Annexin A1 (ANXA1) or the PS-binding core domain, Annexin A2 (ANXA1), Annexin A3 (ANXA1), Annexin A4 (ANXA1), Annexin A5 (ANXA1), Annexin A6 (ANXA1), Annexin A7 (ANXA1), Annexin A8 (ANXA1), Annexin A8 Like 1 (ANXA1), Annexin A9 (ANXA1), Annexin A10 (ANXA1), Annexin A11 (ANXA1), Annexin A13 (ANXA1), Adhesion G Protein Coupled Receptor B1 (ADGRB1) or the extracellular domain thereof, Apolipoprotein H (APO-H), Coagulation Factor II (F2), Coagulation Factor VII (F7), Coagulation Factor IX (F9), Coagulation Factor X (F10), Growth Arrest Specific 6 (CAS6), Milk Fat Globule EGF And Factor V/VIII Domain Containing (MFGE8), Advanced Glycosylation End-Product Specific Receptor (AGER) or the extracellular domain thereof, Jumonji Domain-Containing Protein 6 (JMJD6); Protein S (PROS1), Hepatitis A Virus Cellular Receptor 1 (HAVCR1) or the extracellular domain thereof, Hepatitis A Virus Cellular Receptor 2 (HAVCR2) or the extracellular domain thereof, T Cell Immunoglobulin and Mucin Domain Containing (TIM-3) or the extracellular domain thereof, Protein Kinase C Alpha (PRKCA) or the C2 domain thereof, Synaptotagmin (SYT1) or the C2A domain thereof, Stabilin-1 (STAB1) or the extracellular domain thereof, Stabilin-2 (STAB2) or the extracellular domain thereof, or any combination thereof.

[0102] In an aspect, a disclosed ANXA1 can comprise the amino acid sequence set forth in SEQ ID NO:01 or a fragment thereof. In an aspect, a disclosed ANXA1 can comprise a sequence having at least 70%, at least 75%, at least 80%, at least 85%, at least 90%, or at least 95% identity to the sequence set forth in SEQ ID NO:01 or a fragment thereof. In an aspect, a disclosed ANXA1 can comprise the amino acid sequence set forth in SEQ ID NO:02 or a fragment thereof. In an aspect, a disclosed ANXA1 can comprise a sequence having at least 70%, at least 75%, at least 80%, at least 85%, at least 90%, or at least 95% identity to the sequence set forth in SEQ ID NO:02 or a fragment thereof. In an aspect, a disclosed ANXA2 can comprise the amino acid sequence set forth in SEQ ID NO:03 or a fragment thereof. In an aspect, a disclosed ANXA2 can comprise a sequence having at least 70%, at least 75%, at least 80%, at least 85%, at least 90%, or at least 95% identity to the sequence set forth in SEQ ID NO:03 or a fragment thereof. In an aspect, a disclosed ANXA3 can comprise the amino acid sequence set forth in SEQ ID NO:04 or a fragment thereof. In an aspect, a disclosed ANXA3 can comprise a sequence having at least 70%, at least 75%, at least 80%, at least 85%, at least 90%, or at least 95% identity to the sequence set forth in SEQ ID NO:04 or a fragment thereof. In an aspect, a disclosed ANXA4 can comprise the amino acid sequence set forth in SEQ ID NO:05 or a fragment thereof. In an aspect, a disclosed ANXA4 can comprise a sequence having at least 70%, at least 75%, at least 80%, at least 85%, at least 90%, or at least 95% identity to the sequence set forth in SEQ ID NO:05 or a fragment thereof. In an aspect, a disclosed ANXA5 can comprise the amino acid sequence set forth in SEQ ID NO:06 or a fragment thereof. In an aspect, a disclosed ANXA5 can comprise a sequence having at least 70%, at least 75%, at least 80%, at least 85%, at least 90%, or at least 95% identity to the sequence set forth in SEQ ID NO:06 or a fragment thereof. In an aspect, a disclosed ANXA6 can comprise the amino acid sequence set forth in SEQ ID NO:07 or a fragment thereof. In an aspect, a disclosed ANXA6 can comprise a sequence having at least 70%, at least 75%, at least 80%, at least 85%, at least 90%, or at least 95% identity to the sequence set forth in SEQ ID NO:07 or a fragment thereof. In an aspect, a disclosed ANXA7 can comprise the amino acid sequence set forth in SEQ ID NO:08 or a fragment thereof. In an aspect, a disclosed ANXA7 can comprise a sequence having at least 70%, at least 75%, at least 80%, at least 85%, at least 90%, or at least 95% identity to the sequence set forth in SEQ ID NO:08 or a fragment thereof. In an aspect, a disclosed ANXA8 can comprise the amino acid sequence set forth in SEQ ID NO:09 or a fragment thereof. In an aspect, a disclosed ANXA8 can comprise a sequence having at least 70%, at least 75%, at least 80%, at least 85%, at least 90%, or at least 95% identity to the sequence set forth in SEQ ID NO:09 or a fragment thereof. In an aspect, a disclosed ANXA8L1 can comprise the amino acid sequence set forth in SEQ ID NO:10 or a fragment thereof. In an aspect, a disclosed ANXA8L1 can comprise a sequence having at least 70%, at least 75%, at least 80%, at least 85%, at least 90%, or at least 95% identity to the sequence set forth in SEQ ID NO:10 or a fragment thereof. In an aspect, a disclosed ANXA9 can comprise the amino acid sequence set forth in SEQ ID NO:11 or a fragment thereof. In an aspect, a disclosed ANXA9 signal peptide can comprise a sequence having at least 70%, at least 75%, at least 80%, at least 85%, at least 90%, or at least 95% identity to the sequence set forth in SEQ ID NO:11 or a fragment thereof. In an aspect, a disclosed ANXA10 can comprise the amino acid sequence set forth in SEQ ID NO:12 or a fragment thereof. In an aspect, a disclosed ANXA10 can comprise a sequence having at least 70%, at least 75%, at least 80%, at least 85%, at least 90%, or at least 95% identity to the sequence set forth in SEQ ID NO:12 or a fragment thereof. In an aspect, a disclosed ANXA11 can comprise the amino acid sequence set forth in SEQ ID NO:13 or a fragment thereof. In an aspect, a disclosed ANXA11 can comprise a sequence having at least 70%, at least 75%, at least 80%, at least 85%, at least 90%, or at least 95% identity to the sequence set forth in SEQ ID NO:13 or a fragment thereof. In an aspect, a disclosed ANXA13 can comprise the amino acid sequence set forth in SEQ ID NO:14 or a fragment thereof. In an aspect, a disclosed ANXA13 can comprise a sequence having at least 70%, at least 75%, at least 80%, at least 85%, at least 90%, or at least 95% identity to the sequence set forth in SEQ ID NO:14 or a fragment thereof.

[0103] In an aspect, a disclosed ADGRB1 can comprise the amino acid sequence set forth in SEQ ID NO:15 or a fragment thereof. In an aspect, a disclosed ADGRB1 can comprise a sequence having at least 70%, at least 75%, at least 80%, at least 85%, at least 90%, or at least 95% identity to the sequence set forth in SEQ ID NO:15 or a fragment thereof. In an aspect, a disclosed ADGRB1 can comprise the amino acid sequence set forth in SEQ ID NO:16 or a fragment thereof. In an aspect, a disclosed ADGRB1 can comprise a sequence having at least 70%, at least 75%, at least 80%, at least 85%, at least 90%, or at least 95% identity to the sequence set forth in SEQ ID NO:16 or a fragment thereof. In an aspect, a disclosed APO-H can comprise the amino acid sequence set forth in SEQ ID NO:17 or a fragment thereof. In an aspect, a disclosed APO-H can comprise a sequence having at least 70%, at least 75%, at least 80%, at least 85%, at least 90%, or at least 95% identity to the sequence set forth in SEQ ID NO:17 or a fragment thereof. In an aspect, a disclosed F2 can comprise the amino acid sequence set forth in SEQ ID NO:18 or a fragment thereof. In an aspect, a disclosed F2 can comprise a sequence having at least 70%, at least 75%, at least 80%, at least 85%, at least 90%, or at least 95% identity to the sequence set forth in SEQ ID NO:18 or a fragment thereof. In an aspect, a disclosed F7 can comprise the amino acid sequence set forth in SEQ ID NO:19 or a fragment thereof. In an aspect, a disclosed F7 can comprise a sequence having at least 70%, at least 75%, at least 80%, at least 85%, at least 90%, or at least 95% identity to the sequence set forth in SEQ ID NO:19 or a fragment thereof. In an aspect, a disclosed F9 can comprise the amino acid sequence set forth in SEQ ID NO:20 or a fragment thereof. In an aspect, a disclosed F9 can comprise a sequence having at least 70%, at least 75%, at least 80%, at least 85%, at least 90%, or at least 95% identity to the sequence set forth in SEQ ID NO:20 or a fragment thereof. In an aspect, a disclosed F10 can comprise the amino acid sequence set forth in SEQ ID NO:21 or a fragment thereof. In an aspect, a disclosed F10 can comprise a sequence having at least 70%, at least 75%, at least 80%, at least 85%, at least 90%, or at least 95% identity to the sequence set forth in SEQ ID NO:21 or a fragment thereof. In an aspect, a disclosed GAS6 can comprise the amino acid sequence set forth in SEQ ID NO:22 or a fragment thereof. In an aspect, a disclosed GAS6 an comprise a sequence having at least 70%, at least 75%, at least 80%, at least 85%, at least 90%, or at least 95% identity to the sequence set forth in SEQ ID NO:22 or a fragment thereof. In an aspect, a disclosed MFGE8 can comprise the amino acid sequence set forth in SEQ ID NO:23 or a fragment thereof. In an aspect, a disclosed MFGE8 can comprise a sequence having at least 70%, at least 75%, at least 80%, at least 85%, at least 90%, or at least 95% identity to the sequence set forth in SEQ ID NO:23 or a fragment thereof. In an aspect, a disclosed AGER can comprise the amino acid sequence set forth in SEQ ID NO:24 or a fragment thereof. In an aspect, a disclosed AGER can comprise a sequence having at least 70%, at least 75%, at least 80%, at least 85%, at least 90%, or at least 95% identity to the sequence set forth in SEQ ID NO:24 or a fragment thereof. In an aspect, a disclosed AGER can comprise the amino acid sequence set forth in SEQ ID NO:25 or a fragment thereof. In an aspect, a disclosed AGER can comprise a sequence having at least 70%, at least 75%, at least 80%, at least 85%, at least 90%, or at least 95% identity to the sequence set forth in SEQ ID NO:25 or a fragment thereof. In an aspect, a disclosed PROS1 can comprise the amino acid sequence set forth in SEQ ID NO:26 or a fragment thereof. In an aspect, a disclosed PROS1 can comprise a sequence having at least 70%, at least 75%, at least 80%, at least 85%, at least 90%, or at least 95% identity to the sequence set forth in SEQ ID NO:26 or a fragment thereof. In an aspect, a disclosed STAB1 can comprise the amino acid sequence set forth in SEQ ID NO:27 or a fragment thereof. In an aspect, a disclosed STAB1 can comprise a sequence having at least 70%, at least 75%, at least 80%, at least 85%, at least 90%, or at least 95% identity to the sequence set forth in SEQ ID NO:27 or a fragment thereof. In an aspect, a disclosed STAB1 can comprise the amino acid sequence set forth in SEQ ID NO:28 or a fragment thereof. In an aspect, a disclosed STAB1 can comprise a sequence having at least 70%, at least 75%, at least 80%, at least 85%, at least 90%, or at least 95% identity to the sequence set forth in SEQ ID NO:28 or a fragment thereof. In an aspect, a disclosed STAB2 can comprise the amino acid sequence set forth in SEQ ID NO:29 or a fragment thereof. In an aspect, a disclosed STAB2 can comprise a sequence having at least 70%, at least 75%, at least 80%, at least 85%, at least 90%, or at least 95% identity to the sequence set forth in SEQ ID NO:29 or a fragment thereof. In an aspect, a disclosed STAB2 can comprise the amino acid sequence set forth in SEQ ID NO:30 or a fragment thereof. In an aspect, a disclosed STAB2 can comprise a sequence having at least 70%, at least 75%, at least 80%, at least 85%, at least 90%, or at least 95% identity to the sequence set forth in SEQ ID NO:30 or a fragment thereof.

[0104] In an aspect, a disclosed HAVCR1 can comprise the amino acid sequence set forth in SEQ ID NO:31 or a fragment thereof. In an aspect, a disclosed HAVCR1 can comprise a sequence having at least 70%, at least 75%, at least 80%, at least 85%, at least 90%, or at least 95% identity to the sequence set forth in SEQ ID NO:31 or a fragment thereof. In an aspect, a disclosed HAVCR1 can comprise the amino acid sequence set forth in SEQ ID NO:32 or a fragment thereof. In an aspect, a disclosed HAVCR1 can comprise a sequence having at least 70%, at least 75%, at least 80%, at least 85%, at least 90%, or at least 95% identity to the sequence set forth in SEQ ID NO:32 or a fragment thereof. In an aspect, a disclosed HAVCR2 can comprise the amino acid sequence set forth in SEQ ID NO:33 or a fragment thereof. In an aspect, a disclosed HAVCR2 can comprise a sequence having at least 70%, at least 75%, at least 80%, at least 85%, at least 90%, or at least 95% identity to the sequence set forth in SEQ ID NO:33 or a fragment thereof. In an aspect, a disclosed HAVCR2 can comprise the amino acid sequence set forth in SEQ ID NO:34 or a fragment thereof. In an aspect, a disclosed HAVCR2 can comprise a sequence having at least 70%, at least 75%, at least 80%, at least 85%, at least 90%, or at least 95% identity to the sequence set forth in SEQ ID NO:34 or a fragment thereof. In an aspect, a disclosed TIMD4 can comprise the amino acid sequence set forth in SEQ ID NO:35 or a fragment thereof. In an aspect, a disclosed TIMD4 can comprise a sequence having at least 70%, at least 75%, at least 80%, at least 85%, at least 90%, or at least 95% identity to the sequence set forth in SEQ ID NO:35 or a fragment thereof. In an aspect, a disclosed TIMD4 can comprise the amino acid sequence set forth in SEQ ID NO:36 or a fragment thereof. In an aspect, a disclosed TIMD4 can comprise a sequence having at least 70%, at least 75%, at least 80%, at least 85%, at least 90%, or at least 95% identity to the sequence set forth in SEQ ID NO:36 or a fragment thereof. In an aspect, a disclosed PRKCA can comprise the amino acid sequence set forth in SEQ ID NO:37 or a fragment thereof. In an aspect, a disclosed PRKCA can comprise a sequence having at least 70%, at least 75%, at least 80%, at least 85%, at least 90%, or at least 95% identity to the sequence set forth in SEQ ID NO:37 or a fragment thereof. In an aspect, a disclosed PRKCA can comprise the amino acid sequence set forth in SEQ ID NO:38 or a fragment thereof. In an aspect, a disclosed PRKCA can comprise a sequence having at least 70%, at least 75%, at least 80%, at least 85%, at least 90%, or at least 95% identity to the sequence set forth in SEQ ID NO:38 or a fragment thereof. In an aspect, a disclosed SYT1 can comprise the amino acid sequence set forth in SEQ ID NO:39 or a fragment thereof. In an aspect, a disclosed SYT1 can comprise a sequence having at least 70%, at least 75%, at least 80%, at least 85%, at least 90%, or at least 95% identity to the sequence set forth in SEQ ID NO:39 or a fragment thereof. In an aspect, a disclosed SYT1 can comprise the amino acid sequence set forth in SEQ ID NO:40 or a fragment thereof. In an aspect, a disclosed SYT1 can comprise a sequence having at least 70%, at least 75%, at least 80%, at least 85%, at least 90%, or at least 95% identity to the sequence set forth in SEQ ID NO:40 or a fragment thereof. In an aspect, a disclosed JMJD6 can comprise the amino acid sequence set forth in SEQ ID NO:41 or a fragment thereof. In an aspect, a disclosed JMJD6 can comprise a sequence having at least 70%, at least 75%, at least 80%, at least 85%, at least 90%, or at least 95% identity to the sequence set forth in SEQ ID NO:41 or a fragment thereof.

[0105] In an aspect, a disclosed KLRK1 can comprise the amino acid sequence set forth in SEQ ID NO:102 or a fragment thereof. In an aspect, a disclosed KLRK1 can comprise a sequence having at least 70%, at least 75%, at least 80%, at least 85%, at least 90%, or at least 95% identity to the sequence set forth in SEQ ID NO:102 or a fragment thereof. In an aspect, a disclosed KLRK1 can comprise the amino acid sequence set forth in SEQ ID NO:103 or a fragment thereof. In an aspect, a disclosed KLRK1 can comprise a sequence having at least 70%, at least 75%, at least 80%, at least 85%, at least 90%, or at least 95% identity to the sequence set forth in SEQ ID NO:103 or a fragment thereof.

| Binding | |
|---|---|
| Domain | Identifying Information |
| ANXA1 | HGNC: 533/NCBI Entrez Gene: 301/Ensembl: ENSG00000135046/ |
| | OMIM: 151690/UniProtKB/Swiss-Prot: P04083 |
| ANXA2 | HGNC: 537/NCBI Entrez Gene: 302/Ensembl: ENSG00000182718/ |
| | OMIM: 151740/UniProtKB/Swiss-Prot: P07355) |
| ANXA3 | HGNC: 541/NCBI Entrez Gene: 306/Ensembl: ENSG00000138772/ |
| | OMIM: 106490/UniProtKB/Swiss-Prot: P12429 |
| ANXA4 | HGNC: 542/NCBI Entrez Gene: 307/Ensembl: ENSG00000196975/ |
| | OMIM: 106491/UniProtKB/Swiss-Prot: P09525 |
| ANXA5 | HGNC: 543/NCBI Entrez Gene: 308/Ensembl: ENSG00000164111/ |
| | OMIM: 131230/UniProtKB/Swiss-Prot: P08758 |
| ANXA6 | HGNC: 544/NCBI Entrez Gene: 309/Ensembl: ENSG00000197043/ |
| | OMIM: 114070/UniProtKB/Swiss-Prot: P08133 |
| ANXA7 | HGNC: 545/NCBI Entrez Gene: 310/Ensembl: ENSG00000138279/ |
| | OMIM: 186360/UniProtKB/Swiss-Prot: P20073 |
| ANXA8 | HGNC: 546/NCBI Entrez Gene: 653145/Ensembl: ENSG00000265190/ |
| | OMIM: 602396/UniProtKB/Swiss-Prot: P13928 |
| ANX8L1 | HGNC: 23334/NCBI Entrez Gene: 728113/Ensembl: ENSG00000264230/ |
| | UniProtKB/Swiss-Prot: Q5VT79 |
| ANXA9 | HGNC: 547/NCBI Entrez Gene: 8416/Ensembl: ENSG00000143412/ |
| | OMIM: 603319/UniProtKB/Swiss-Prot: O76027 |
| ANXA10 | HGNC: 534/NCBI Entrez Gene: 11199/Ensembl: ENSG00000109511/ |
| | OMIM: 608008/UniProtKB/Swiss-Prot: Q9UJ72 |
| ANXA11 | HGNC: 535/NCBI Entrez Gene: 311/Ensembl: ENSG00000122359/ |
| | OMIM: 602572/UniProtKB/Swiss-Prot: P50995 |
| ANXA13 | HGNC: 536/NCBI Entrez Gene: 312/Ensembl: ENSG00000104537/ |
| | OMIM: 602573/UniProtKB/Swiss-rot: P27216 |
| F2 | HGNC: 3535/NCBI Entrez Gene: 2147/Ensembl: ENSG00000180210/ |
| | OMIM: 176930/UniProtKB/Swiss-Prot: P00734) |
| F7 | (HGNC: 3544/NCBI Entrez Gene: 2155/Ensembl: ENSG00000057593/ |
| | OMIM: 613878/UniProtKB/Swiss-Prot: P08709) |
| F9 | (HGNC: 3551/NCBI Entrez Gene: 2158/Ensembl: ENSG00000101981/ |
| | OMIM: 300746/UniProtKB/Swiss-Prot: P00740) |
| F10 | (HGNC: 3528/NCBI Entrez Gene: 2159/Ensembl: ENSG00000126218/ |
| | OMIM: 613872/UniProtKB/Swiss-Prot: P00742) |
| AGER/ | (HGNC: 320 NCBI/Entrez Gene: 177/Ensembl: ENSG00000204305/ |
| RAGE | OMIM: 600214/UniProtKB/Swiss-Prot: Q15109 |
| GAS6 | HGNC: 4168 NCBI/Entrez Gene: 2621/Ensembl: ENSG00000183087/ |
| | OMIM: 600441/UniProtKB/Swiss-Prot: Q14393 |
| MFGE8 | HGNC: 7036 NCBI Entrez Gene: 4240/Ensembl: ENSG00000140545/ |
| | OMIM: 602281/UniProtKB/Swiss-Prot: Q08431 |
| AGCR/ | HGNC: 943/NCBI Entrez Gene: 575/Ensembl: ENSG00000181790/ |
| BAI1 | OMIM: 602682/UniProtKB/Swiss-Prot: O14514) |
| PROS | HGNC: 9456 NCBI Entrez Gene: 5627 Ensembl: ENSG00000184500 |
| | OMIM: 176880/UniProtKB/Swiss-Prot: P07225 |
| HAVCR1 | HGNC: 17866/NCBI Entrez Gene: 26762/Ensembl: ENSG00000113249/ |
| | OMIM: 606518/UniProtKB/Swiss-Prot: Q96D42 |
| HAVCR1 | HGNC: 18437/NCBI Entrez Gene: 84868 Ensembl: ENSG00000135077/ |
| | OMIM: 606652/UniProtKB/Swiss-Prot: Q8TDQ0 |
| TIMD4 | HGNC: 25132/NCBI Entrez Gene: 91937 Ensembl: ENSG00000145850/ |
| | OMIM: 610096/UniProtKB/Swiss-Prot: Q96H15 |
| PKCα | HGNC: 9393/NCBI Entrez Gene: 5578 Ensembl: ENSG00000154229/ |
| | OMIM: 176960/UniProtKB/Swiss-Prot: P17252 |
| SYT1 | HGNC: 11509/NCBI Entrez Gene: 6857 Ensembl: ENSG00000067715/ |
| | OMIM: 185605 UniProtKB/Swiss-Prot: P21579 |
| JMJD6 | HGNC: 19355/NCBI Entrez Gene: 23210 Ensembl: ENSG00000070495 |
| | OMIM: 604914 UniProtKB/Swiss-Prot: Q6NYC1 |
| APO-H | HGNC: 616/NCBI Entrez Gene: 350/Ensembl: ENSG00000091583/ |
| | OMIM: 138700/UniProtKB/Swiss-Prot: P02749 |
| STAB1 | HGNC: 18628/NCBI Entrez Gene: 23166/Ensembl: ENSG00000010327/ |
| | OMIM: 608560/UniProtKB/Swiss-Prot: Q9NY15 |
| STAB2 | HGNC: 18629/NCBI Entrez Gene: 55576/Ensembl: ENSG00000136011/ |
| | OMIM: 608561/UniProtKB/Swiss-Prot: Q8WWQ8 |
| KLRK1 | HGNC: 18788/NCBI Entrez Gene: 22914/Ensembl: ENSG00000213809/ |
| | OMIM: 611817/UniProtKB/Swiss-Prot: P26718 |

[0106] In an aspect, a disclosed PS binding domain can comprise the single-chain variable domain of bavituximab. In an aspect, a disclosed PS binding domain can comprise the sequence set forth in SEQ ID NO:55 or a fragment thereof. In an aspect, a disclosed PS binding chain can comprise a sequence having at least 70%, at least 75%, at least 80%, at least 85%, at least 90%, or at least 95% identity to the sequence set forth in SEQ ID NO:55 or a fragment thereof. In an aspect, a disclosed PS binding domain can comprise the single-chain variable domain of PGN632. In an aspect, a single-chain variable domain of PGN632 can comprise a γ1 heavy chain and a λ light chain. In an aspect, a single-chain variable domain of PGN632 can bind to cardiolipin/PS. In an aspect, a disclosed PS binding domain can comprise the single-chain variable domain of P1. In an aspect, a single-chain variable domain of P1 can comprise a γ1 heavy chain and a λ light chain. In an aspect, a single-chain variable domain of P1 can bind to cardiolipin/PS. In an aspect, a disclosed PS binding domain can comprise the single-chain variable domain of IS4. In an aspect, a single-chain variable domain of IS4 can comprise a γ3 VH1 heavy chain and a λ Vλ2 light chain. In an aspect, a single-chain variable domain of IS4 can bind to cardiolipin/PS. In an aspect, a disclosed PS binding domain can comprise the single-chain variable domain of CL1. In an aspect, a single-chain variable domain of CLL can comprise a γ3 VH1 heavy chain and a λ V3 light chain. In an aspect, a single-chain variable domain of IS4 can bind to cardiolipin/PS. In an aspect, PGN632, P1, IS4, and CLL are described in Moody et al. (2010) J. Exp. Med. 207(4):763-776, which is incorporated herein by reference for its teachings of these antibodies and their characteristics.

[0107] In an aspect of a disclosed chimeric fusion protein, a disclosed PS binding domain can be attached, linked, and/or conjugated to a disclosed immunostimulatory domain by any operative means. In an aspect, a disclosed operative means can comprise a direct covalent bond (e.g., a chemical cross-linker). In an aspect, a disclosed operative means can comprise direct attachment (e.g., avidin:biotin).

[0108] In an aspect, a disclosed PS binding domain protein and the operatively attached disclosed immunostimulatory domain can retain functionality. For example, the disclosed PS binding domain protein operatively linked to the disclosed immunostimulatory domain can retain one or more desired effector functions including, for example, pro-apoptotic and/or anti-angiogenic functions.

[0109] In an aspect, the disclosed PS binding domain protein operatively linked to the disclosed immunostimulatory domain can retain one or more desired effector functions including, for example, pro-apoptotic and/or anti-angiogenic functions. In an aspect, a disclosed PS binding domain protein operatively linked to the disclosed immunostimulatory domain can stimulate host effector functions, can target phosphatidylserine on tumor cells (including dividing, injured, and/or stressed), can localize to targeted cells and/or targeted sites (such as a hematological cancer cell), can exert any therapeutic effect (e.g., anti-cancer and/or anti-viral effects), or any combination thereof.

[0110] In an aspect, a disclosed linker can comprise a flexible linker. In an aspect, a flexible linker can comprise (GGGGS)n, wherein n=1-8 (SEQ ID NO:109-SEQ ID NO:116). In an aspect, a flexible linker can comprise (G)n, wherein n=1-8 (SEQ ID NO: 117-SEQ ID NO:124). In an aspect, a disclosed linker can comprise a rigid linker. In an aspect, a flexible linker can comprise (EAAAK)n, wherein n=1-8 (SEQ ID NO:125-SEQ ID NO:132). In an aspect, a disclosed linker can comprise a Whitlow linker. In an aspect, a Whitlow linker can comprise (GSTSGSGKSSEGKG)n, wherein n=1-8 (SEQ ID NO:133-SEQ ID NO:140). In an aspect, a Whitlow linker can comprise (GSTSGSGKPGSGEGSTKG)n, wherein n=1-8 (SEQ ID NO:141-SEQ ID NO:148). Linkers are known to the skilled person in the art.

[0111] In an aspect of a chimeric fusion protein, a disclosed immunostimulatory domain can be attached, linked, and/or conjugated by any operative means to a disclosed PS binding domain.

[0112] In an aspect, a disclosed immunostimulatory domain can comprise a Fc domain of an immunoglobulin. In an aspect, a disclosed immunoglobulin can be a human immunoglobulin. In an aspect, a disclosed human immunoglobulin can be IgG1, IgG2, IgG3, IgG4, or any combination thereof. In an aspect, a disclosed immunostimulatory domain can comprises the Fc domain of IgG1. In an aspect, a disclosed immunostimulatory domain can comprises the Fc domain of IgG2. In an aspect, a disclosed immunostimulatory domain can comprise the Fc domain of IgG3. In an aspect, a disclosed immunostimulatory domain can comprise the Fc domain of IgG4.

[0113] In an aspect, a disclosed chimeric fusion protein can comprise a PS-binding domain operably linked to the Fc domain of IgG1. In an aspect, a disclosed chimeric fusion protein can comprise a PS-binding domain operably linked to the Fc domain of IgG2. In an aspect, a disclosed chimeric fusion protein can comprise a PS-binding domain operably linked to the Fc domain of IgG3. In an aspect, a disclosed chimeric fusion protein can comprise a PS-binding domain operably linked to the Fc domain of IgG4.

[0114] In an aspect, a disclosed chimeric fusion protein can comprise a PS-binding domain operably linked to the Fc domain of human IgG1. In an aspect, a disclosed chimeric fusion protein can comprise a PS-binding domain operably linked to the Fc domain of human IgG2. In an aspect, a disclosed chimeric fusion protein can comprise a PS-binding domain operably linked to the Fc domain of human IgG3. In an aspect, a disclosed chimeric fusion protein can comprise a PS-binding domain operably linked to the Fc domain of human IgG4.

[0115] In an aspect, a disclosed IgG1 can comprise the sequence set forth in SEQ ID NO:84 or a fragment thereof. In an aspect, a disclosed IgG1 can comprise a sequence having at least 70%, at least 75%, at least 80%, at least 85%, at least 90%, or at least 95% identity to the sequence set forth in SEQ ID NO:84 or a fragment thereof.

[0116] In an aspect, a disclosed immunostimulatory domain can comprise a single-chain antibody (scFv) to a human CD3 protein. The CD3 antigen is a surface structure associated with the T-cell receptor (TCR) to form a complex involved in antigen recognition and signal transduction. CD3 comprises four distinct chains. In mammals, the CD3 complex comprises a CD3γ chain, a CD3δ chain, and two CD3ε chains. These chains associate with the T-cell receptor (TCR) and the CD3-zeta (ζ-chain) to generate an activation signal in T lymphocytes. The TCR, CD3-zeta, and the other CD3 molecules together constitute the TCR complex. In an aspect, an anti-CD3 antibody can comprise a OKT3 or humanized OKT3 antibody. In an aspect, an anti-CD3 anti-body can comprise OKT3 (muromab), ChAglyCD3 (otelixizumab), hOKT3γ1 (teplizumab), nuvion (visilizumab), NI-0401 (foralumab), a UCHT1 or humanized UCHT1 antibody, tepilizumab, TRX4 (otlixizumab), or any combination thereof. In an aspect, a disclosed immunostimulatory domain can comprise one or more anti-CD3 antibodies.

[0117] In an aspect, a disclosed bi-specific chimeric fusion protein can comprise a disclosed PS-binding domain and an anti-CD marker for hematological cancer (e.g., CD1a, CD2, CD3, CD4, CD5, CD7, CD8, CD9, CD10, CD11b, CD11c, CD13, CD14, CD15, CD16, CD19, CD20, CD22, CD23, CD25, CD26, CD30, CD33, CD34, CD36, CD38, CD41, CD43, CD45, CD45RA, CD45RO, CD52, CD56, CD58, CD61, CD64, CD71, CD79a, CD79b, CD103, CD117, CD123, CD138, or CD163).

[0118] In an aspect, a disclosed PS-binding domain operably linked to an Fc domain can be fused to an additional immunostimulatory domain. In an aspect, a disclosed additional immunostimulatory domain can be any disclosed immunostimulatory domain. In an aspect, a disclosed additional immunostimulatory domain can be fused, attached, linked, and/or conjugated by any operative means to a disclosed PS-binding domain operably linked to an Fc domain. In an aspect, a disclosed additional immunostimulatory domain can comprise a Fc domain of an immunoglobulin. In an aspect, a disclosed additional immunoglobulin can be a human immunoglobulin. In an aspect, a disclosed additional human immunoglobulin can be IgG1, IgG2, IgG3, IgG4, or any combination thereof. In an aspect, a disclosed additional immunostimulatory domain can comprises the Fc domain of IgG1. In an aspect, a disclosed additional immunostimulatory domain can comprises the Fc domain of IgG2. In an aspect, a disclosed additional immunostimulatory domain can comprise the Fc domain of IgG3. In an aspect, a disclosed additional immunostimulatory domain can comprise the Fc domain of IgG4.

[0119] In an aspect, a disclosed chimeric fusion protein can comprise a PS-binding domain operably linked to the Fc domain of IgG1. In an aspect, a disclosed chimeric fusion protein can comprise a PS-binding domain operably linked to the Fc domain of IgG2. In an aspect, a disclosed chimeric fusion protein can comprise a PS-binding domain operably linked to the Fc domain of IgG3. In an aspect, a disclosed chimeric fusion protein can comprise a PS-binding domain operably linked to the Fc domain of IgG4.

[0120] In an aspect, a disclosed chimeric fusion protein can comprise a homozygous dimer of a disclosed PS-binding domain linked to an scFv against CD3, which can be fused with an Fc domain. In an aspect, a disclosed chimeric fusion protein can comprise a homozygous dimer of a disclosed PS-binding domain linked to an scFv against CD3 connected through a Fc hinge region (but not a Fc domain). In an aspect, a disclosed chimeric fusion protein can comprise a disclosed PS-binding domain linked to an scFv against CD3, which can be fused with an Fc domain only. In an aspect, a disclosed chimeric fusion protein can comprise a heterozygous dimer of a PS-binding domain and an anti-CD3 scFv but not a Fc domain. In an aspect, a disclosed chimeric fusion protein can comprise a heterozygous dimer of a PS-binding domain and an anti-CD3 scFv fused with Fc domain.

[0121] In an aspect, a disclosed chimeric fusion protein can further comprise a conjugated and/or fused small molecule. In an aspect, a disclosed small molecule can be a disclosed tubulin interactor, a disclosed DNA modifier, a disclosed RNA inhibitor, or any combination thereof. In an aspect, a disclosed small molecule can be a disclosed tubulin interactor, a disclosed DNA modifier, a disclosed RNA inhibitor, or any combination thereof.

[0122] In an aspect, a disclosed tubulin interactor can comprise a maytansinoid or an auristatin. In an aspect, a disclosed maytansinoid can be a class of microtubulin polymerization inhibitors derived from the naturally occurring maytansine (e.g., a benzoansamacrolide that is isolated from the bark of the African shrub Maytenus ovatus). In an aspect, maytansine can bind tubulin at the vinca-binding site, similar to vinca alkaloids, and can thereby depolymerizing tubulin and inducing mitotic arrest. In an aspect, a disclosed synthetic maytansine derivatives can comprise a 100-1000-fold increase in potency over a drug maytansinoid (DMs). In an aspect, a disclosed maytansine derivative can comprise a modification enabling conjugation to an antibody. In an aspect, a disclosed maytansinoid-based ADC can be trastuzumab emtansine. Auristatins are a family of complex analogues to the native antineoplastic product dolastatin 10. In an aspect, auristatins can be 100 to 1000 times more toxic than doxorubicin. In an aspect, auristatins can inhibit microtubule formation through the interaction with tubulin at the “peptide sub-site” of tubulin's “Vinca domain” and can disrupt tubulin-dependent GTP hydrolysis. In an aspect, auristatins can lead to the arrest of cancer cells in the mitosis stage and can eventually elicit apoptosis. In an aspect, a disclosed auristatin-based ADC can comprise brentuximab vedotin (SGN-35), polatuzumab vedotin (RG7596/DCDS-4501 A), enfortumab vedotin (AGS-22ME, telisotuzumab vedotin (ABBV-399), tisotumab vedotin (HuMax-TF-ADC), anti-PSMA ADC, ladiratuzumab vedotin (SGN-LIV1A), enapotamab vedotin (HuMax-Axl-ADC), AGS-16C3F, GSK-2857916, or any combination thereof.

[0123] In an aspect, a disclosed ADC payload can a DNA modifier. In an aspect, a disclosed DNA modifier can comprise a calicheamicin, a duocarmycin, or a camptothecin. In an aspect, calicheamicins are a family of enediyne antitumor antibiotics that were isolated from the fermentation broth of Micromonospora echinospora. In an aspect, a disclosed calicheamicin can cause strand scission of the DNA through a reaction similar to the Bergman cyclization that generates a diradical species which abstracts a proton from the sugar backbone, the process being initiated by nucleophilic attack on the central atom of the trisulphide. In an aspect, calicheamicin can be approximately 4000 times more potent than doxorubicin. In an aspect, duocarmycins are another class of DNA-alkylating agents that bind the minor groove of DNA and alkylate the adenine residues at the N3 position. Duocarmycin analogues, among which CC-1065 and duocarmycin SA are the most widely used, represent a series of extremely powerful antineoplastic compounds that display high cytotoxicity against the growing cancer cells in culture. Duocarmycin analogues are DNA minor groove binding agents that also exert adenine-N3 alkylation activity and an AT-sequence selectivity. In an aspect, duocarmycin analogues can bind the minor groove of DNA and then can induce irreversible DNA alkylation that hinders DNA architecture and structural integrity. The alkylation of DNA eventually leads to DNA cleavage and subsequently, tumor cell death via apoptosis. In an aspect, duocarmycins can cleave DNA at any cellular cycle. In an aspect, duocarmycin analogues can be effective on solid tumors.

[0124] In an aspect, camptothecin is a cytotoxic plant alkaloid originally isolated from C. acuminate that can inhibit DNA and RNA synthesis in mammalian cells and can be an effective anti-tumor agent. Camptothecin can inhibit topoisomerase I with an IC₅₀ of 679 nM. In an aspect, camptothecin can bind and can stabilize topoisomerase I-DNA cleavage complexes, which can lead to DNA strand breaks. The resultant DNA damage can induce cell cycle arrest in many cancer cell lines. In an aspect, inactivation of the tumor suppressor protein p53 can increase the cytotoxicity of camptothecin.

[0125] In an aspect, a disclosed ADC can be SN38 (7-ethyl-10-hydroxy-camptothecin). In an aspect, SN-38 can bind to and can inhibit topoisomerase I by stabilizing the cleavable complex between topoisomerase I and DNA, thereby resulting in DNA breaks, inhibition of DNA replication, and apoptosis. SN-38 can exhibit up to 1,000-fold more cytotoxic activity against various cancer cells in vitro than irinotecan. In an aspect, SN38 can be a liposomal formulation. In an aspect, a liposocomal formulation of SN-38 can increase the solubility of SN-38 and can improve the pharmacodynamic profile as compared to SN-38 alone.

[0126] In an aspect, a disclosed ADC payload can comprise a RNA inhibitor. In an aspect, a disclosed RNA inhibitor can be an amatoxins.

[0127] Amatoxins are bicyclic octapeptides of which alpha, beta, and gamma amatoxins are the most powerful toxins. The molecular weight of an amatoxin can be about 900 Da. In an aspect, amatoxins can be heat stable and can remain toxic after prolonged periods of storage. In an aspect, amatoxins can inhibit RNA polymerase II function thereby disrupting DNA and RNA transcription. In an aspect, a disclosed ADC can be FDA approved, for example, gemtuzumab ozogamicin, inotuzumab ozogamicin, ado-trastuzumab emtansine, brentuximab vedotin), polatuzumab vedotin, or any combination thereof.

[0128] In an aspect, a disclosed ADC can be a STING (i.e., stimulator of interferon (IFN) genes) agonist and/or a STING-targeting compound. In an aspect, STING is an endoplasmic protein that can induce the production of pro-inflammatory cytokines such as type I IFNs. STING is a transmembrane protein localized to the endoplasmic reticulum and functions as an adaptor protein in the cGAS (cyclic GMP-AMP synthase)-STING pathway. cGAS-STING is a cytosolic DNA-sensing pathway that drives activation of type I IFN and other inflammatory cytokines in the host immune response against tumors. Recognition of cytoplasmic tumor-derived DNA by c-GAS can generate cGAMPs (e.g., natural ligands of STING protein). The binding of cGAMP to STING can induce transformational changes in STING protein, activating a downstream signaling cascade involving TBK1 and IRF-3, which results in the production of type I IFNs. In an aspect, a disclosed STING agonist can be DMXAA, ASA404, ADU-S100/MIW815, MK-1454, MK-2118, SB11285, GSK3745417, BMS-986301, BI-STING (BI 1387446), E7766, TAK-676, SNX281, JNJ-67544412 (JNJ-4412), BI-STING, 3′3′-cyclic 3′3′-cAIMP, GSK532, Ryvu's agonists, GF3-002, Selvita agonists, TTI-10001, JNJ-6196, CRD5500, CS-1018, CS-1020, CS-1010, MSA-1, ALG-031048, E7766, SR-8541A, SR-8314, oral ENPP1 inhibitors, MV-626, or any combination thereof. In an aspect, a disclosed STING-targeting compound can be a cyclic dinucleotide (CDN), a non-CDN agonist, a macrocyclic STING agonist, an ENPP1 inhibitor, or any combination thereof.

[0129] In an aspect, a disclosed conjugated and/or fused small molecule can be an immune-stimulatory protein. In an aspect, a disclosed immune-stimulatory protein can be a SIRPα (IgV domain) or a subdomain thereof. SIRPα, also known as CD172a or Src homology 2 (SH2) domain-containing phosphatase substrate-1, is a cell surface receptor expressed predominantly in monocytes, granulocytes, dendritic cells and hematopoietic stem cell. In an aspect, a disclosed subdomain of SIRPα can bind CD47. CD47, an SIRPα ligand, has been described as an important anti-phagocytic signal expressed on tumor cells. In an aspect, a disclosed signal regulatory protein (SIRP) family comprises an inhibitory receptor, SIRPα, an activating receptor, SIRP3 (also known as cluster of differentiation (CD)172b), and a non-signaling receptor, SIRP7 (also known as CD172g). As known to the art, CD47 is a membrane protein expressed in nearly all cell types. The Ig domain of CD47 and the N-terminal Ig domain of SIRPα can bind directly. In an aspect, the binding of SIRPα to CD47 can promote tyrosine phosphorylation of the cytoplasmic region of SIRPα. In an aspect, a disclosed protein tyrosine phosphatase, SHP-2 (also known as tyrosine-protein phosphatase non-receptor type 11), can bind to the cytoplasmic region of SIRPα to mediate the functions of SIRPα by dephosphorylating its substrates. In an aspect, SIRPα can function as a negative signaling regulator. In an aspect, a disclosed chimeric fusion protein comprising a conjugated and/or fused SIRPα (IgV domain) or a subdomain thereof can comprise the sequence set forth in SEQ ID NO:99, SEQ ID NO:100, or SEQ ID NO:101.

[0130] In an aspect, a disclosed immune-stimulatory protein can comprise the extracellular domain of the NKG2D protein. KLRK1 (Killer Cell Lectin Like Receptor K1) is a protein-coding gene. Natural killer (NK) cells are lymphocytes that can mediate lysis of certain tumor cells and virus-infected cells without previous activation. They can also regulate specific humoral and cell-mediated immunity. NK cells preferentially express several calcium-dependent (C-type) lectins, which have been implicated in the regulation of NK cell function. The NKG2 gene family is located within the NK complex, a region that contains several C-type lectin genes preferentially expressed in NK cells. This gene encodes a member of the NKG2 family. The encoded transmembrane protein is characterized by a type II membrane orientation (has an extracellular C terminus) and the presence of a C-type lectin domain. It binds to a diverse family of ligands that include MHC class I chain-related A and B proteins and UL-16 binding proteins, where ligand-receptor interactions can result in the activation of NK and T cells. The surface expression of these ligands is important for the recognition of stressed cells by the immune system, and thus this protein and its ligands are therapeutic targets for the treatment of immune diseases and cancers. Read-through transcription exists between this gene and the upstream KLRC4 (killer cell lectin-like receptor subfamily C, member 4) family member in the same cluster. Diseases associated with KLRK1 include cowpox and immunodeficiency, X-Linked, with Magnesium Defect, Epstein-Barr Virus Infection, and neoplasia. Among its related pathways are DAP12 interactions and innate immune system. Gene Ontology (GO) annotations related to this gene include signaling receptor activity and carbohydrate binding. An important paralog of this gene is OLR1.

[0131] In an aspect, a disclosed conjugated and/or fused small molecule can be an immune-stimulatory protein.

[0132] In an aspect, a disclosed small molecule can be a disclosed tubulin interactor, a disclosed DNA modifier, a disclosed RNA inhibitor, or any combination thereof. In an aspect, a disclosed chimeric fusion protein comprising a conjugated and/or fused NKG2D can comprise the sequence set forth in SEQ ID NO:106.

[0133] In an aspect, a disclosed therapeutically effective amount or effective dose of a disclosed chimeric fusion protein or pharmaceutical formulation thereof can be about 0.01 μg/kg to about 10 mg/kg per subject.

[0134] In an aspect, a disclosed chimeric fusion protein can comprise the structure set forth in FIG. 5A, FIG. 5B, FIG. 5C, FIG. 5D, FIG. 5E, FIG. 5F, or FIG. 5G. In an aspect, a disclosed chimeric fusion protein is bi-specific (e.g., PS binding domain and anti-CD3). In an aspect, a disclosed chimeric fusion protein can comprise the structure set forth in FIG. 5A, FIG. 5B, FIG. 5C, FIG. 5D, FIG. 5E, FIG. 5F, or FIG. 5G, wherein the PS-binding domain comprises any disclosed PS-binding domain and wherein the anti-CD3 binding domain comprises any disclosed binding domain. In an aspect, a disclosed bi-specific chimeric fusion protein can comprise a disclosed PS-binding domain and an anti-CD marker for hematological cancer (e.g., CD1a, CD2, CD3, CD4, CD5, CD7, CD8, CD9, CD10, CD11b, CD11c, CD13, CD14, CD15, CD16, CD19, CD20, CD22, CD23, CD25, CD26, CD30, CD33, CD34, CD36, CD38, CD41, CD43, CD45, CD45RA, CD45RO, CD52, CD56, CD58, CD61, CD64, CD71, CD79a, CD79b, CD103, CD117, CD123, CD138, or CD163).

[0135] In an aspect, a disclosed chimeric fusion protein can be part of an antibody drug conjugate (ADCs). In an aspect, a disclosed ADC payload can be restricted to highly potent cytotoxic molecules (pM to nM IC50) and can rely on delivery of these highly potent cytotoxic molecules to the targeted cells or tumor microenvironment. In an aspect, a disclosed ADC payload can be defined by its mechanism of action.

[0136] In an aspect, a disclosed ADC payload can be a tubulin interactor. In an aspect, a disclosed tubulin interactor can comprise a maytansinoids, or an auristatin. In an aspect, a disclosed chimeric fusion protein can induce cell death in the targeted cell. In an aspect, a disclosed chimeric fusion protein can stimulate an effector cell mediated immune modulator response to PS-expressing tumor cells. In an aspect, a disclosed chimeric fusion protein can induce a tumor reducing immune response. In an aspect, a disclosed chimeric fusion protein can induce phagocytosis of cancer cells in the subject. In an aspect, a disclosed chimeric fusion protein can cross-prime an anti-tumor T cell response. In an aspect, a disclosed chimeric fusion protein can induce a tumor eliminating immune response. In an aspect, a disclosed ADC can treat cancer. In an aspect, a disclosed chimeric fusion protein can improve and/or extend the survivability of the subject, can improve a subject's quality of life, can increase and/or prolong a subject's life span, or any combination thereof.

[0137] Disclosed herein is a chimeric fusion protein, comprising a phosphatidylserine (PS) binding domain, a linker, and an immunostimulatory domain. Disclosed herein is a chimeric fusion protein, comprising a phosphatidylserine (PS) binding domain operably linked to an immunostimulatory domain. Disclosed herein is a chimeric fusion protein, comprising a secretion signal and a phosphatidylserine (PS) binding domain operably linked to an immunostimulatory domain. Disclosed herein is a chimeric fusion protein comprising a phosphatidylserine (PS) binding domain operably linked to an immunostimulatory domain, wherein the immunostimulatory domain further comprise a conjugated small molecule.

[0138] In an aspect, a disclosed chimeric fusion protein can be part of an antibody drug conjugate (ADCs). In an aspect, a disclosed ADC can enable the delivery of cytotoxic payloads to PS-expressing cancer cells. In an aspect, a disclosed ADCs can act by directly targeting and then killing selected cells, affecting both the growth and behavior of cells. In an aspect, a disclosed ADC can comprise three parts including (i) a disclosed antibody specific to the target associated antigen (i.e., phosphatidylserine on a tumor cell), (ii) a payload designed to kill target cancer cells, and (iii) a chemical linker to attach the payload to the antibody

### 2. Antibody Drug Conjugates

[0139] Disclosed herein is an antibody drug conjugate comprising a disclosed chimeric fusion protein. Disclosed herein is an antibody drug conjugate comprising a disclosed chimeric fusion protein comprising a phosphatidylserine (PS) binding domain. Disclosed herein is an antibody drug conjugate comprising a disclosed chimeric fusion protein comprising a phosphatidylserine (PS) binding domain and an immunostimulatory domain. Disclosed herein is an antibody drug conjugate comprising a disclosed chimeric fusion protein comprising a phosphatidylserine (PS) binding domain operably linked an immunostimulatory domain. Disclosed herein is an antibody drug conjugate comprising a disclosed chimeric fusion protein comprising a phosphatidylserine (PS) binding domain, a linker, and an immunostimulatory domain. Disclosed herein is an antibody drug conjugate comprising a disclosed chimeric fusion protein comprising a phosphatidylserine (PS) binding domain operably linked to an immunostimulatory domain, wherein the immunostimulatory domain further comprise a conjugated small molecule. Disclosed herein is an antibody drug conjugate comprising a disclosed chimeric fusion protein comprising a secretion signal and a phosphatidylserine (PS) binding domain. Disclosed herein is an antibody drug conjugate comprising a disclosed chimeric fusion protein comprising a secretion signal, a phosphatidylserine (PS) binding domain, and an immunostimulatory domain. Disclosed herein is an antibody drug conjugate comprising a disclosed chimeric fusion protein comprising a secretion signal and a phosphatidylserine (PS) binding domain operably linked an immunostimulatory domain. Disclosed herein is an antibody drug conjugate comprising a disclosed chimeric fusion protein comprising a secretion signal, a phosphatidylserine (PS) binding domain, a linker, and an immunostimulatory domain. Disclosed herein is an antibody drug conjugate comprising a disclosed chimeric fusion protein comprising a secretion signal and a phosphatidylserine (PS) binding domain operably linked to an immunostimulatory domain, wherein the immunostimulatory domain further comprise a conjugated small molecule.

[0140] Disclosed herein is an antibody drug conjugate comprising a disclosed chimeric fusion protein comprising a PS-binding domain operably linked to an IgG1 Fc domain. Disclosed herein is an antibody drug conjugate comprising a disclosed chimeric fusion protein comprising a PS-binding domain operably linked to an IgG1 Fc domain and an additional immunostimulatory domain. Disclosed herein is an antibody drug conjugate comprising a disclosed chimeric fusion protein comprising a PS-binding domain operably linked to an IgG1 Fc domain and an additional immunostimulatory domain, wherein the additional immunostimulatory domain comprises the IgV domain of SIRPα or the extracellular domain of NKG2D protein. Disclosed herein is an antibody drug conjugate comprising a disclosed chimeric fusion protein comprising a PS-binding domain operably linked to a single-chain antibody (scFV) to a human CD3 protein. Disclosed herein is an antibody drug conjugate comprising a disclosed chimeric fusion protein comprising an Annexin-binding domain operably linked to a single-chain antibody (scFV) to a human CD3 protein. Disclosed herein is an antibody drug conjugate comprising a disclosed chimeric fusion protein comprising a PS-binding domain operably linked to a single-chain antibody (scFV) to a human CD3 protein and one or more additional immunostimulatory domains. Disclosed herein is an antibody drug conjugate comprising a disclosed chimeric fusion protein comprising an Annexin-binding domain operably linked to a single-chain antibody (scFV) to a human CD3 protein and one or more additional immunostimulatory domains.

[0141] Disclosed herein is an antibody-drug conjugate comprising a disclosed chimeric fusion protein comprising the sequence set forth in SEQ ID NO:85, SEQ ID NO:86, SEQ ID NO:87, SEQ ID NO:88, SEQ ID NO:89, SEQ ID NO:90, SEQ ID NO:91, SEQ ID NO:92, SEQ ID NO:93, SEQ ID NO:94, SEQ ID NO:95, SEQ ID NO:96, SEQ ID NO:97, SEQ ID NO:99, SEQ ID NO:100, SEQ ID NO:101, SEQ ID NO:106, or a fragment thereof.

[0142] In an aspect, a disclosed antibody-drug conjugate can comprise a disclosed chimeric fusion protein comprising the structure set forth in FIG. 5A, FIG. 5B, FIG. 5C, FIG. 5D, FIG. 5E, FIG. 5F, or FIG. 5G. In an aspect, a disclosed chimeric fusion protein is bi-specific (e.g., PS binding domain and anti-CD3). In an aspect, a disclosed antibody-drug conjugate can comprise a disclosed chimeric fusion protein comprising the structure set forth in FIG. 5A, FIG. 5B, FIG. 5C, FIG. 5D, FIG. 5E, FIG. 5F, or FIG. 5G, wherein the PS-binding domain comprises any disclosed PS-binding domain and wherein the anti-CD3 binding domain comprises any disclosed binding domain. In an aspect, a disclosed bi-specific chimeric fusion protein can comprise a disclosed PS-binding domain and an anti-CD marker for hematological cancer (e.g., CD1a, CD2, CD3, CD4, CD5, CD7, CD8, CD9, CD10, CD11b, CD11c, CD13, CD14, CD15, CD16, CD19, CD20, CD22, CD23, CD25, CD26, CD30, CD33, CD34, CD36, CD38, CD41, CD43, CD45, CD45RA, CD45RO, CD52, CD56, CD58, CD61, CD64, CD71, CD79a, CD79b, CD103, CD117, CD123, CD138, or CD163).

[0143] In an aspect, a disclosed ADC can enable the delivery of cytotoxic payloads to PS-expressing cancer cells. In an aspect, a disclosed ADCs can act by directly targeting and then killing selected cells, affecting both the growth and behavior of cells. In an aspect, a disclosed ADC can comprise three parts including (i) a disclosed antibody specific to the target associated antigen (i.e., phosphatidylserine on a tumor cell), (ii) a payload designed to kill target cancer cells, and (iii) a linker to attach the payload to the antibody.

[0144] In an aspect of an ADC, a disclosed linker can be stable in circulation, but can release a disclosed cytotoxic agent in the targeted cells. In an aspect, a disclosed linker can be a noncleavable linker or can be cleavable linker.

[0145] In an aspect, a disclosed noncleavable linker can comprise a stable bonds that resists proteolytic degradation. In an aspect, a disclosed noncleavable linker can provide higher stability than a cleavable linker. In an aspect, a disclosed mechanism of action of a noncleavable linker can be based on the internalization of the ADC complex followed by degradation of the mAb component in the lysosome, thereby resulting in the release of a cytotoxic drug that kills tumor cells. In an aspect, a disclosed noncleavable linker does not unleash cytotoxic agents at off-target sites and thus do not harm healthy cells. In an aspect, a disclosed noncleavable linker can make it possible to modify the chemical properties of small molecules to modulate the affinity of the transporter and to improve the efficiency.

[0146] In an aspect, a disclosed cleavable linker can be cleaved by environmental differences (such as redox potential, pH) and specific lysosomal enzymes in response to extracellular and intracellular environments. In an aspect, a disclosed cleavable linker can be an acid-sensitive linker or an acid-labile linker. In an aspect, cleavable linkers can comprise IMMU-100.

[0147] In an aspect, a disclosed cleavable linker can be a lysosomal protease-sensitive linker. In an aspect, a disclosed lysosomal protease-sensitive linker can comprise a valine-citrulline linker, a valine-alanine linker, or a phenylalanine-lysine linker.

[0148] In an aspect, a disclosed cleavable linker can be a β-glucuronide linker. In an aspect, a disclosed β-glucuronide linker can be recognized and hydrolyzed by β-glucuronidase for payload release. In an aspect, a disclosed cleavable linker can be a glutathione-sensitive disulfide linker. In an aspect, a disclosed β-glucuronide linker can be recognized and hydrolyzed by β-glucuronidase for payload release.

[0149] In an aspect, a disclosed linker can be a nonreducible thioether linkage (SMCC). In an aspect, a disclosed linker can be a nonreducible thioether linker MCC (4-[N-maleimidomethyl]cyclohexane-1-carboxylate).

[0150] In an aspect, a disclosed antibody specific to the target-associated antigen can comprise a disclosed chimeric fusion protein. In an aspect, a disclosed antibody specific to the target-associated antigen can be specific for a PS-expressing hematological cancer cell. In an aspect, a disclosed antibody can be specific to the target-associated antigen with restricted or no expression on normal and/or healthy cells.

[0151] In an aspect, a disclosed ADC can comprise a potent cytotoxic agent. In an aspect, a disclosed chimeric fusion protein can further comprise a conjugated and/or fused small molecule. In an aspect, a disclosed small molecule can be a disclosed tubulin interactor, a disclosed DNA modifier, a disclosed RNA inhibitor, or any combination thereof. In an aspect, a disclosed ADC payload can be restricted to highly potent cytotoxic molecules (pM to nM IC50) and can rely on delivery of these highly potent cytotoxic molecules to the targeted cells or tumor microenvironment.

[0152] In an aspect, a disclosed ADC payload can be defined by its mechanism of action. In an aspect, a disclosed ADC payload can be a tubulin interactor. In an aspect, a disclosed tubulin interactor can comprise a maytansinoids or an auristatin (discussed supra). In an aspect, a disclosed ADC payload can a DNA modifier. In an aspect, a disclosed DNA modifier can comprise a calicheamicin, a duocarmycin, or a camptothecin (discussed supra). In an aspect, a disclosed ADC payload can comprise an RNA inhibitor. In an aspect, a disclosed RNA inhibitor can be an amatoxin (discussed supra). In an aspect, a disclosed ADC can comprise a combination of chemotherapy and immunotherapy.

[0153] In an aspect, a disclosed ADC can induce cell death in the targeted cell. In an aspect, a disclosed ADC can stimulate an effector cell mediated immune modulator response to PS-expressing tumor cells. In an aspect, a disclosed ADC can induce a tumor reducing immune response. In an aspect, a disclosed ADC can induce phagocytosis of cancer cells in the subject. In an aspect, a disclosed ADC can cross-prime an anti-tumor T cell response. In an aspect, a disclosed ADC can induce a tumor eliminating immune response. In an aspect, a disclosed ADC can treat cancer. In an aspect, a disclosed ADC can improve and/or extend the survivability of the subject, can improve a subject's quality of life, can increase and/or prolong a subject's life span, or any combination thereof.

### 3. Isolated Nucleic Acid Molecules

[0154] Disclosed herein are isolated nucleic acid molecules comprising a nucleic acid sequence encoding one or more disclosed chimeric fusion proteins. Disclosed herein is an isolated nucleic acid molecule comprising a nucleic acid sequence encoding a chimeric fusion protein comprising a phosphatidylserine (PS) binding domain. Disclosed herein is an isolated nucleic acid molecule comprising a nucleic acid sequence encoding a chimeric fusion protein comprising a phosphatidylserine (PS) binding domain and an immunostimulatory domain. Disclosed herein is an isolated nucleic acid molecule comprising a nucleic acid sequence encoding a chimeric fusion protein comprising a phosphatidylserine (PS) binding domain operably linked an immunostimulatory domain. Disclosed herein is an isolated nucleic acid molecule comprising a nucleic acid sequence encoding a phosphatidylserine (PS) binding domain, a linker, and an immunostimulatory domain. Disclosed herein is an isolated nucleic acid molecule comprising a nucleic acid sequence encoding a chimeric fusion protein comprising a phosphatidylserine (PS) binding domain operably linked to an immunostimulatory domain, wherein the immunostimulatory domain further comprise a conjugated small molecule.

[0155] Disclosed herein is an isolated nucleic acid molecule comprising a nucleic acid sequence encoding a chimeric fusion protein comprising a secretion signal and a phosphatidylserine (PS) binding domain. Disclosed herein is an isolated nucleic acid molecule comprising a nucleic acid sequence encoding a chimeric fusion protein comprising a secretion signal, a phosphatidylserine (PS) binding domain, and an immunostimulatory domain. Disclosed herein is an isolated nucleic acid molecule comprising a nucleic acid sequence encoding a chimeric fusion protein comprising a secretion signal and a phosphatidylserine (PS) binding domain operably linked an immunostimulatory domain. Disclosed herein is an isolated nucleic acid molecule comprising a nucleic acid sequence encoding a chimeric fusion protein comprising a secretion signal, a phosphatidylserine (PS) binding domain, a linker, and an immunostimulatory domain.

[0156] Disclosed herein is an isolated nucleic acid molecule comprising a nucleic acid sequence encoding a chimeric fusion protein comprising a secretion signal and a phosphatidylserine (PS) binding domain operably linked to an immunostimulatory domain, wherein the immunostimulatory domain further comprise a conjugated small molecule.

[0157] Disclosed herein is an isolated nucleic acid molecule comprising a nucleic acid sequence encoding a chimeric fusion protein comprising a PS-binding domain operably linked to an IgG1 Fc domain. Disclosed herein is an isolated nucleic acid molecule comprising a nucleic acid sequence encoding a chimeric fusion protein comprising a PS-binding domain operably linked to an IgG1 Fc domain and an additional immunostimulatory domain. Disclosed herein is an isolated nucleic acid molecule comprising a nucleic acid sequence encoding a chimeric fusion protein comprising a PS-binding domain operably linked to an IgG1 Fc domain and an additional immunostimulatory domain, wherein the additional immunostimulatory domain comprises the IgV domain of SIRPα or the extracellular domain of NKG2D protein.

[0158] Disclosed herein is an isolated nucleic acid molecule comprising a nucleic acid sequence encoding a chimeric fusion protein comprising a PS-binding domain operably linked to a single-chain antibody (scFV) to a human CD3 protein. Disclosed herein is an isolated nucleic acid molecule comprising a nucleic acid sequence encoding a chimeric fusion protein comprising an Annexin-binding domain operably linked to a single-chain antibody (scFV) to a human CD3 protein. Disclosed herein is an isolated nucleic acid molecule comprising a nucleic acid sequence encoding a single-chain antibody (scFV) to a human CD3 protein and one or more additional immunostimulatory domains. Disclosed herein is an isolated nucleic acid molecule comprising a nucleic acid sequence encoding a chimeric fusion protein comprising an Annexin-binding domain operably linked to a single-chain antibody (scFV) to a human CD3 protein and one or more additional immunostimulatory domains.

[0159] Disclosed herein is an isolated nucleic acid molecule comprising a nucleic acid sequence encoding a chimeric fusion protein comprising the sequence set forth in SEQ ID NO:85, SEQ ID NO:86, SEQ ID NO:87, SEQ ID NO:88, SEQ ID NO:89, SEQ ID NO:90, SEQ ID NO:91, SEQ ID NO:92, SEQ ID NO:93, SEQ ID NO:94, SEQ ID NO:95, SEQ ID NO:96, SEQ ID NO:97, SEQ ID NO:99, SEQ ID NO:100, SEQ ID NO:101, SEQ ID NO:106, or a fragment thereof.

[0160] In an aspect, a disclosed isolated nucleic acid molecule can comprise a nucleic acid sequence encoding a disclosed chimeric fusion protein comprising the structure set forth in FIG. 5A, FIG. 5B, FIG. 5C, FIG. 5D, FIG. 5E, FIG. 5F, or FIG. 5G. In an aspect, a discloses isolated nucleic acid molecule can comprise the sequence encoding a disclosed bi-specific chimeric fusion protein (e.g., PS binding domain and anti-CD3). In an aspect, a disclosed isolated nucleic acid molecule can comprises a nucleic acid sequence encoding a disclosed chimeric fusion protein can comprise the structure set forth in FIG. 5A, FIG. 5B, FIG. 5C, FIG. 5D, FIG. 5E, FIG. 5F, or FIG. 5G, wherein the PS-binding domain comprises any disclosed PS-binding domain and wherein the anti-CD3 binding domain comprises any disclosed binding domain. In an aspect, a disclosed bi-specific chimeric fusion protein can comprise a disclosed PS-binding domain and an anti-CD marker for hematological cancer (e.g., CD1a, CD2, CD3, CD4, CD5, CD7, CD8, CD9, CD10, CD11b, CD11c, CD13, CD14, CD15, CD16, CD19, CD20, CD22, CD23, CD25, CD26, CD30, CD33, CD34, CD36, CD38, CD41, CD43, CD45, CD45RA, CD45RO, CD52, CD56, CD58, CD61, CD64, CD71, CD79a, CD79b, CD103, CD117, CD123, CD138, or CD163).

[0161] In an aspect, a disclosed nucleic sequence can be a DNA sequence or an RNA sequence.

[0162] In an aspect of a disclosed isolated nucleic acid molecule encoding a chimeric fusion protein, a disclosed PS binding domain can comprise Annexin A1 (ANXA1) or the PS-binding core domain, Annexin A2 (ANXA1), Annexin A3 (ANXA1), Annexin A4 (ANXA1), Annexin A5 (ANXA1), Annexin A6 (ANXA1), Annexin A7 (ANXA1), Annexin A8 (ANXA1), Annexin A8 Like 1 (ANXA1), Annexin A9 (ANXA1), Annexin A10 (ANXA1), Annexin A11 (ANXA1), Annexin A13 (ANXA1), Adhesion G Protein Coupled Receptor B1 (ADGRB1) or the extracellular domain thereof, Apolipoprotein H (APO-H), Coagulation Factor II (F2), Coagulation Factor VII (F7), Coagulation Factor IX (F9), Coagulation Factor X (F10), Growth Arrest Specific 6 (CAS6), Milk Fat Globule EGF And Factor V/VIII Domain Containing (MFGE8), Advanced Glycosylation End-Product Specific Receptor (AGER) or the extracellular domain thereof, Jumonji Domain-Containing Protein 6 (JMJD6); Protein S (PROS1), Hepatitis A Virus Cellular Receptor 1 (HAVCR1) or the extracellular domain thereof, Hepatitis A Virus Cellular Receptor 2 (HAVCR2) or the extracellular domain thereof, T Cell Immunoglobulin and Mucin Domain Containing (TIM-3) or the extracellular domain thereof, Protein Kinase C Alpha (PRKCA) or the C2 domain thereof, Synaptotagmin (SYT1) or the C2A domain thereof, Stabilin-1 (STAB1) or the extracellular domain thereof, Stabilin-2 (STAB2) or the extracellular domain thereof, or any combination thereof.

[0163] In an aspect, a disclosed ANXA1 can comprise the amino acid sequence set forth in SEQ ID NO:01 or a fragment thereof. In an aspect, a disclosed ANXA1 can comprise a sequence having at least 70%, at least 75%, at least 80%, at least 85%, at least 90%, or at least 95% identity to the sequence set forth in SEQ ID NO:01 or a fragment thereof. In an aspect, a disclosed ANXA1 can comprise the amino acid sequence set forth in SEQ ID NO:02 or a fragment thereof. In an aspect, a disclosed ANXA1 can comprise a sequence having at least 70%, at least 75%, at least 80%, at least 85%, at least 90%, or at least 95% identity to the sequence set forth in SEQ ID NO:02 or a fragment thereof. In an aspect, a disclosed ANXA2 can comprise the amino acid sequence set forth in SEQ ID NO:03 or a fragment thereof. In an aspect, a disclosed ANXA2 can comprise a sequence having at least 70%, at least 75%, at least 80%, at least 85%, at least 90%, or at least 95% identity to the sequence set forth in SEQ ID NO:03 or a fragment thereof. In an aspect, a disclosed ANXA3 can comprise the amino acid sequence set forth in SEQ ID NO:04 or a fragment thereof. In an aspect, a disclosed ANXA3 can comprise a sequence having at least 70%, at least 75%, at least 80%, at least 85%, at least 90%, or at least 95% identity to the sequence set forth in SEQ ID NO:04 or a fragment thereof. In an aspect, a disclosed ANXA4 can comprise the amino acid sequence set forth in SEQ ID NO:05 or a fragment thereof. In an aspect, a disclosed ANXA4 can comprise a sequence having at least 70%, at least 75%, at least 80%, at least 85%, at least 90%, or at least 95% identity to the sequence set forth in SEQ ID NO:05 or a fragment thereof. In an aspect, a disclosed ANXA5 can comprise the amino acid sequence set forth in SEQ ID NO:06 or a fragment thereof. In an aspect, a disclosed ANXA5 can comprise a sequence having at least 70%, at least 75%, at least 80%, at least 85%, at least 90%, or at least 95% identity to the sequence set forth in SEQ ID NO:06 or a fragment thereof. In an aspect, a disclosed ANXA6 can comprise the amino acid sequence set forth in SEQ ID NO:07 or a fragment thereof. In an aspect, a disclosed ANXA6 can comprise a sequence having at least 70%, at least 75%, at least 80%, at least 85%, at least 90%, or at least 95% identity to the sequence set forth in SEQ ID NO:07 or a fragment thereof. In an aspect, a disclosed ANXA7 can comprise the amino acid sequence set forth in SEQ ID NO:08 or a fragment thereof. In an aspect, a disclosed ANXA7 can comprise a sequence having at least 70%, at least 75%, at least 80%, at least 85%, at least 90%, or at least 95% identity to the sequence set forth in SEQ ID NO:08 or a fragment thereof. In an aspect, a disclosed ANXA8 can comprise the amino acid sequence set forth in SEQ ID NO:09 or a fragment thereof. In an aspect, a disclosed ANXA8 can comprise a sequence having at least 70%, at least 75%, at least 80%, at least 85%, at least 90%, or at least 95% identity to the sequence set forth in SEQ ID NO:09 or a fragment thereof. In an aspect, a disclosed ANXA8L1 can comprise the amino acid sequence set forth in SEQ ID NO:10 or a fragment thereof. In an aspect, a disclosed ANXA8L1 can comprise a sequence having at least 70%, at least 75%, at least 80%, at least 85%, at least 90%, or at least 95% identity to the sequence set forth in SEQ ID NO:10 or a fragment thereof. In an aspect, a disclosed ANXA9 can comprise the amino acid sequence set forth in SEQ ID NO:11 or a fragment thereof. In an aspect, a disclosed ANXA9 signal peptide can comprise a sequence having at least 70%, at least 75%, at least 80%, at least 85%, at least 90%, or at least 95% identity to the sequence set forth in SEQ ID NO:11 or a fragment thereof. In an aspect, a disclosed ANXA10 can comprise the amino acid sequence set forth in SEQ ID NO:12 or a fragment thereof. In an aspect, a disclosed ANXA10 can comprise a sequence having at least 70%, at least 75%, at least 80%, at least 85%, at least 90%, or at least 95% identity to the sequence set forth in SEQ ID NO:12 or a fragment thereof. In an aspect, a disclosed ANXA11 can comprise the amino acid sequence set forth in SEQ ID NO:13 or a fragment thereof. In an aspect, a disclosed ANXA11 can comprise a sequence having at least 70%, at least 75%, at least 80%, at least 85%, at least 90%, or at least 95% identity to the sequence set forth in SEQ ID NO:13 or a fragment thereof. In an aspect, a disclosed ANXA13 can comprise the amino acid sequence set forth in SEQ ID NO:14 or a fragment thereof. In an aspect, a disclosed ANXA13 can comprise a sequence having at least 70%, at least 75%, at least 80%, at least 85%, at least 90%, or at least 95% identity to the sequence set forth in SEQ ID NO:14 or a fragment thereof.

[0164] In an aspect, a disclosed ADGRB1 can comprise the amino acid sequence set forth in SEQ ID NO:15 or a fragment thereof. In an aspect, a disclosed ADGRB1 can comprise a sequence having at least 70%, at least 75%, at least 80%, at least 85%, at least 90%, or at least 95% identity to the sequence set forth in SEQ ID NO:15 or a fragment thereof. In an aspect, a disclosed ADGRB1 can comprise the amino acid sequence set forth in SEQ ID NO:16 or a fragment thereof. In an aspect, a disclosed ADGRB1 can comprise a sequence having at least 70%, at least 75%, at least 80%, at least 85%, at least 90%, or at least 95% identity to the sequence set forth in SEQ ID NO:16 or a fragment thereof. In an aspect, a disclosed APO-H can comprise the amino acid sequence set forth in SEQ ID NO:17 or a fragment thereof. In an aspect, a disclosed APO-H can comprise a sequence having at least 70%, at least 75%, at least 80%, at least 85%, at least 90%, or at least 95% identity to the sequence set forth in SEQ ID NO:17 or a fragment thereof. In an aspect, a disclosed F2 can comprise the amino acid sequence set forth in SEQ ID NO:18 or a fragment thereof. In an aspect, a disclosed F2 can comprise a sequence having at least 70%, at least 75%, at least 80%, at least 85%, at least 90%, or at least 95% identity to the sequence set forth in SEQ ID NO:18 or a fragment thereof. In an aspect, a disclosed F7 can comprise the amino acid sequence set forth in SEQ ID NO:19 or a fragment thereof. In an aspect, a disclosed F7 can comprise a sequence having at least 70%, at least 75%, at least 80%, at least 85%, at least 90%, or at least 95% identity to the sequence set forth in SEQ ID NO:19 or a fragment thereof. In an aspect, a disclosed F9 can comprise the amino acid sequence set forth in SEQ ID NO:20 or a fragment thereof. In an aspect, a disclosed F9 can comprise a sequence having at least 70%, at least 75%, at least 80%, at least 85%, at least 90%, or at least 95% identity to the sequence set forth in SEQ ID NO:20 or a fragment thereof. In an aspect, a disclosed F10 can comprise the amino acid sequence set forth in SEQ ID NO:21 or a fragment thereof. In an aspect, a disclosed F10 can comprise a sequence having at least 70%, at least 75%, at least 80%, at least 85%, at least 90%, or at least 95% identity to the sequence set forth in SEQ ID NO:21 or a fragment thereof. In an aspect, a disclosed GAS6 can comprise the amino acid sequence set forth in SEQ ID NO:22 or a fragment thereof. In an aspect, a disclosed GAS6 an comprise a sequence having at least 70%, at least 75%, at least 80%, at least 85%, at least 90%, or at least 95% identity to the sequence set forth in SEQ ID NO:22 or a fragment thereof. In an aspect, a disclosed MFGE8 can comprise the amino acid sequence set forth in SEQ ID NO:23 or a fragment thereof. In an aspect, a disclosed MFGE8 can comprise a sequence having at least 70%, at least 75%, at least 80%, at least 85%, at least 90%, or at least 95% identity to the sequence set forth in SEQ ID NO:23 or a fragment thereof. In an aspect, a disclosed AGER can comprise the amino acid sequence set forth in SEQ ID NO:24 or a fragment thereof. In an aspect, a disclosed AGER can comprise a sequence having at least 70%, at least 75%, at least 80%, at least 85%, at least 90%, or at least 95% identity to the sequence set forth in SEQ ID NO:24 or a fragment thereof. In an aspect, a disclosed AGER can comprise the amino acid sequence set forth in SEQ ID NO:25 or a fragment thereof. In an aspect, a disclosed AGER can comprise a sequence having at least 70%, at least 75%, at least 80%, at least 85%, at least 90%, or at least 95% identity to the sequence set forth in SEQ ID NO:25 or a fragment thereof. In an aspect, a disclosed PROS1 can comprise the amino acid sequence set forth in SEQ ID NO:26 or a fragment thereof. In an aspect, a disclosed PROS1 can comprise a sequence having at least 70%, at least 75%, at least 80%, at least 85%, at least 90%, or at least 95% identity to the sequence set forth in SEQ ID NO:26 or a fragment thereof. In an aspect, a disclosed STAB1 can comprise the amino acid sequence set forth in SEQ ID NO:27 or a fragment thereof. In an aspect, a disclosed STAB1 can comprise a sequence having at least 70%, at least 75%, at least 80%, at least 85%, at least 90%, or at least 95% identity to the sequence set forth in SEQ ID NO:27 or a fragment thereof. In an aspect, a disclosed STAB1 can comprise the amino acid sequence set forth in SEQ ID NO:28 or a fragment thereof. In an aspect, a disclosed STAB1 can comprise a sequence having at least 70%, at least 75%, at least 80%, at least 85%, at least 90%, or at least 95% identity to the sequence set forth in SEQ ID NO:28 or a fragment thereof. In an aspect, a disclosed STAB2 can comprise the amino acid sequence set forth in SEQ ID NO:29 or a fragment thereof. In an aspect, a disclosed STAB2 can comprise a sequence having at least 70%, at least 75%, at least 80%, at least 85%, at least 90%, or at least 95% identity to the sequence set forth in SEQ ID NO:29 or a fragment thereof. In an aspect, a disclosed STAB2 can comprise the amino acid sequence set forth in SEQ ID NO:30 or a fragment thereof. In an aspect, a disclosed STAB2 can comprise a sequence having at least 70%, at least 75%, at least 80%, at least 85%, at least 90%, or at least 95% identity to the sequence set forth in SEQ ID NO:30 or a fragment thereof.

[0165] In an aspect, a disclosed HAVCR1 can comprise the amino acid sequence set forth in SEQ ID NO:31 or a fragment thereof. In an aspect, a disclosed HAVCR1 can comprise a sequence having at least 70%, at least 75%, at least 80%, at least 85%, at least 90%, or at least 95% identity to the sequence set forth in SEQ ID NO:31 or a fragment thereof. In an aspect, a disclosed HAVCR1 can comprise the amino acid sequence set forth in SEQ ID NO:32 or a fragment thereof. In an aspect, a disclosed HAVCR1 can comprise a sequence having at least 70%, at least 75%, at least 80%, at least 85%, at least 90%, or at least 95% identity to the sequence set forth in SEQ ID NO:32 or a fragment thereof. In an aspect, a disclosed HAVCR2 can comprise the amino acid sequence set forth in SEQ ID NO:33 or a fragment thereof. In an aspect, a disclosed HAVCR2 can comprise a sequence having at least 70%, at least 75%, at least 80%, at least 85%, at least 90%, or at least 95% identity to the sequence set forth in SEQ ID NO:33 or a fragment thereof. In an aspect, a disclosed HAVCR2 can comprise the amino acid sequence set forth in SEQ ID NO:34 or a fragment thereof. In an aspect, a disclosed HAVCR2 can comprise a sequence having at least 70%, at least 75%, at least 80%, at least 85%, at least 90%, or at least 95% identity to the sequence set forth in SEQ ID NO:34 or a fragment thereof. In an aspect, a disclosed TIMD4 can comprise the amino acid sequence set forth in SEQ ID NO:35 or a fragment thereof. In an aspect, a disclosed TIMD4 can comprise a sequence having at least 70%, at least 75%, at least 80%, at least 85%, at least 90%, or at least 95% identity to the sequence set forth in SEQ ID NO:35 or a fragment thereof. In an aspect, a disclosed TIMD4 can comprise the amino acid sequence set forth in SEQ ID NO:36 or a fragment thereof. In an aspect, a disclosed TIMD4 can comprise a sequence having at least 70%, at least 75%, at least 80%, at least 85%, at least 90%, or at least 95% identity to the sequence set forth in SEQ ID NO:36 or a fragment thereof. In an aspect, a disclosed PRKCA can comprise the amino acid sequence set forth in SEQ ID NO:37 or a fragment thereof. In an aspect, a disclosed PRKCA can comprise a sequence having at least 70%, at least 75%, at least 80%, at least 85%, at least 90%, or at least 95% identity to the sequence set forth in SEQ ID NO:37 or a fragment thereof. In an aspect, a disclosed PRKCA can comprise the amino acid sequence set forth in SEQ ID NO:38 or a fragment thereof. In an aspect, a disclosed PRKCA can comprise a sequence having at least 70%, at least 75%, at least 80%, at least 85%, at least 90%, or at least 95% identity to the sequence set forth in SEQ ID NO:38 or a fragment thereof. In an aspect, a disclosed SYT1 can comprise the amino acid sequence set forth in SEQ ID NO:39 or a fragment thereof. In an aspect, a disclosed SYT1 can comprise a sequence having at least 70%, at least 75%, at least 80%, at least 85%, at least 90%, or at least 95% identity to the sequence set forth in SEQ ID NO:39 or a fragment thereof. In an aspect, a disclosed SYT1 can comprise the amino acid sequence set forth in SEQ ID NO:40 or a fragment thereof. In an aspect, a disclosed SYT1 can comprise a sequence having at least 70%, at least 75%, at least 80%, at least 85%, at least 90%, or at least 95% identity to the sequence set forth in SEQ ID NO:40 or a fragment thereof. In an aspect, a disclosed JMJD6 can comprise the amino acid sequence set forth in SEQ ID NO:41 or a fragment thereof. In an aspect, a disclosed JMJD6 can comprise a sequence having at least 70%, at least 75%, at least 80%, at least 85%, at least 90%, or at least 95% identity to the sequence set forth in SEQ ID NO:41 or a fragment thereof.

[0166] In an aspect, a disclosed KLRK1 can comprise the amino acid sequence set forth in SEQ ID NO:102 or a fragment thereof. In an aspect, a disclosed KLRK1 can comprise a sequence having at least 70%, at least 75%, at least 80%, at least 85%, at least 90%, or at least 95% identity to the sequence set forth in SEQ ID NO:102 or a fragment thereof. In an aspect, a disclosed KLRK1 can comprise the amino acid sequence set forth in SEQ ID NO:103 or a fragment thereof. In an aspect, a disclosed KLRK1 can comprise a sequence having at least 70%, at least 75%, at least 80%, at least 85%, at least 90%, or at least 95% identity to the sequence set forth in SEQ ID NO:103 or a fragment thereof.

[0167] In an aspect, a disclosed secretion signal can be any secretion signal known to the art. In an aspect, a disclosed secretion signal can comprise the sequence set forth in SEQ ID NO:107-SEQ ID NO:108.

[0168] In an aspect, a disclosed nucleic acid sequence can be an RNA sequence or a mRNA sequence. In an aspect, a disclosed mRNA sequence can be transcribed into an encoded PS binding domain. In an aspect, a disclosed mRNA sequence can be transcribed into Annexin A1 (ANXA1) or the PS-binding core domain, Annexin A2 (ANXA1), Annexin A3 (ANXA1), Annexin A4 (ANXA1), Annexin A5 (ANXA1), Annexin A6 (ANXA1), Annexin A7 (ANXA1), Annexin A8 (ANXA1), Annexin A8 Like 1 (ANXA1), Annexin A9 (ANXA1), Annexin A10 (ANXA1), Annexin A11 (ANXA1), Annexin A13 (ANXA1), Adhesion G Protein Coupled Receptor B1 (ADGRB1) or the extracellular domain thereof, Apolipoprotein H (APO-H), Coagulation Factor II (F2), Coagulation Factor VII (F7), Coagulation Factor IX (F9), Coagulation Factor X (F10), Growth Arrest Specific 6 (CAS6), Milk Fat Globule EGF And Factor V/VIII Domain Containing (MFGE8), Advanced Glycosylation End-Product Specific Receptor (AGER) or the extracellular domain thereof, Jumonji Domain-Containing Protein 6 (JMJD6); Protein S (PROS1), Hepatitis A Virus Cellular Receptor 1 (HAVCR1) or the extracellular domain thereof, Hepatitis A Virus Cellular Receptor 2 (HAVCR2) or the extracellular domain thereof, T Cell Immunoglobulin and Mucin Domain Containing (TIM-3) or the extracellular domain thereof, Protein Kinase C Alpha (PRKCA) or the C2 domain thereof, Synaptotagmin (SYT1) or the C2A domain thereof, Stabilin-1 (STAB1) or the extracellular domain thereof, Stabilin-2 (STAB2) or the extracellular domain thereof, or any combination thereof.

[0169] In an aspect, a disclosed mRNA sequence can be transcribed into Annexin A1 (ANXA1) or the PS-binding core domain, Annexin A2 (ANXA1), Annexin A3 (ANXA1), Annexin A4 (ANXA1), Annexin A5 (ANXA1), Annexin A6 (ANXA1), Annexin A7 (ANXA1), Annexin A8 (ANXA1), Annexin A8 Like 1 (ANXA1), Annexin A9 (ANXA1), Annexin A10 (ANXA1), Annexin A11 (ANXA1), or Annexin A13 (ANXA1) can comprise the sequence set forth in SEQ ID NO:56-SEQ ID NO:83.

[0170] In an aspect, a disclosed mRNA sequence can be transcribed into Annexin A1 (ANXA1) or the PS-binding core domain, Annexin A2 (ANXA1), Annexin A3 (ANXA1), Annexin A4 (ANXA1), Annexin A5 (ANXA1), Annexin A6 (ANXA1), Annexin A7 (ANXA1), Annexin A8 (ANXA1), Annexin A8 Like 1 (ANXA1), Annexin A9 (ANXA1), Annexin A10 (ANXA1), Annexin A11 (ANXA1), or Annexin A13 (ANXA1) can comprise a sequence having at least 70%, at least 75%, at least 80%, at least 85%, at least 90%, or at least 95% identity to the sequence set forth in SEQ ID NO:56-SEQ ID NO:83.

[0171] In an aspect of a disclosed isolated nucleic acid molecule, a disclosed encoded PS binding domain can comprise the single-chain variable domain of bavituximab. In an aspect, a disclosed encoded PS binding domain can comprise the sequence set forth in SEQ ID NO:55 or a fragment thereof. In an aspect, a disclosed encoded PS binding chain can comprise a sequence having at least 70%, at least 75%, at least 80%, at least 85%, at least 90%, or at least 95% identity to the sequence set forth in SEQ ID NO:55 or a fragment thereof. In an aspect, a disclosed encoded PS binding domain can comprise the single-chain variable domain of PGN632. In an aspect, a disclosed PS binding domain can comprise the single-chain variable domain of PGN632. In an aspect, a single-chain variable domain of PGN632 can comprise a γ1 heavy chain and a λ light chain. In an aspect, a single-chain variable domain of PGN632 can bind to cardiolipin/PS. In an aspect, a disclosed PS binding domain can comprise the single-chain variable domain of P1. In an aspect, a single-chain variable domain of P1 can comprise a γ1 heavy chain and a λ light chain. In an aspect, a single-chain variable domain of P1 can bind to cardiolipin/PS. In an aspect, a disclosed PS binding domain can comprise the single-chain variable domain of IS4. In an aspect, a single-chain variable domain of IS4 can comprise a γ3 VH1 heavy chain and a λ Vλ2 light chain. In an aspect, a single-chain variable domain of IS4 can bind to cardiolipin/PS. In an aspect, a disclosed PS binding domain can comprise the single-chain variable domain of CL1. In an aspect, a single-chain variable domain of CLL can comprise a γ3 VH1 heavy chain and a λ Vλ3 light chain. In an aspect, a single-chain variable domain of IS4 can bind to cardiolipin/PS. In an aspect, PGN632, P1, IS4, and CLL are described in Moody et al. (2010) J. Exp. Med. 207(4):763-776, which is incorporated herein by reference for its teachings of these antibodies and their characteristics.

[0172] In an aspect of a disclosed isolated nucleic acid molecule, a disclosed encoded PS binding domain can comprise a scFV and wherein the scFV can comprise a linker. In an aspect, a disclosed encoded linker can join the V_{H} and V_{L} regions of the ScFv.

[0173] In an aspect, a disclosed isolated nucleic acid molecule can be introduced to T cells and/or NK cells. In an aspect, a disclosed isolated nucleic acid molecule can be used to activated one or more types of immune cells (e.g., naive T cells, central memory T cells, effector memory T cells, NK cells or combination thereof) upon antigen binding.

[0174] In an aspect, a disclosed isolated nucleic acid molecule can stimulate an effector cell mediated immune modulator response to PS-expressing tumor cells. In an aspect, a disclosed isolated nucleic acid molecule can induce a tumor reducing immune response. In an aspect, a disclosed isolated nucleic acid molecule can induce phagocytosis of cancer cells in the subject. In an aspect, a disclosed isolated nucleic acid molecule can cross-prime an anti-tumor T cell response. In an aspect, a disclosed isolated nucleic acid molecule can induce a tumor eliminating immune response. In an aspect, a disclosed isolated nucleic acid molecule can effect cell death of PS-expression cells. In an aspect, a disclosed isolated nucleic acid molecule can treat cancer.

[0175] In an aspect, a disclosed isolated nucleic acid molecule can induce cell death in the targeted cell. In an aspect, a disclosed isolated nucleic acid molecule can stimulate an effector cell mediated immune modulator response to PS-expressing tumor cells. In an aspect, a disclosed isolated nucleic acid molecule can induce a tumor reducing immune response. In an aspect, a disclosed isolated nucleic acid molecule can induce phagocytosis of cancer cells in the subject. In an aspect, a disclosed isolated nucleic acid molecule can cross-prime an anti-tumor T cell response. In an aspect, a disclosed isolated nucleic acid molecule can induce a tumor eliminating immune response. In an aspect, a disclosed ADC can treat cancer. In an aspect, a disclosed isolated nucleic acid molecule can improve and/or extend the survivability of the subject, can improve a subject's quality of life, can increase and/or prolong a subject's life span, or any combination thereof.

### 4. Vectors

[0176] Disclosed herein is a vector comprising a disclosed isolated nucleic acid molecule. Disclosed herein is a vector comprising an isolated nucleic acid molecule comprising a nucleic acid sequence encoding one or more disclosed chimeric fusion proteins. Disclosed herein is a vector comprising an isolated nucleic acid molecule comprising a nucleic acid sequence encoding a chimeric fusion protein comprising a phosphatidylserine (PS) binding domain. Disclosed herein is a vector comprising an isolated nucleic acid molecule comprising a nucleic acid sequence encoding a chimeric fusion protein comprising a phosphatidylserine (PS) binding domain and an immunostimulatory domain. Disclosed herein is a vector comprising an isolated nucleic acid molecule comprising a nucleic acid sequence encoding a chimeric fusion protein comprising a phosphatidylserine (PS) binding domain operably linked an immunostimulatory domain. Disclosed herein is a vector comprising an isolated nucleic acid molecule comprising a nucleic acid sequence encoding a phosphatidylserine (PS) binding domain, a linker, and an immunostimulatory domain. Disclosed herein is a vector comprising an isolated nucleic acid molecule comprising a nucleic acid sequence encoding a chimeric fusion protein comprising a phosphatidylserine (PS) binding domain operably linked to an immunostimulatory domain, wherein the immunostimulatory domain further comprise a conjugated small molecule. Disclosed herein is a vector comprising an isolated nucleic acid molecule comprising a nucleic acid sequence encoding a chimeric fusion protein comprising a secretion signal and a phosphatidylserine (PS) binding domain.

[0177] Disclosed herein is a vector comprising an isolated nucleic acid molecule comprising a nucleic acid sequence encoding a chimeric fusion protein comprising a secretion signal, a phosphatidylserine (PS) binding domain, and an immunostimulatory domain. Disclosed herein is a vector comprising an isolated nucleic acid molecule comprising a nucleic acid sequence encoding a chimeric fusion protein comprising a secretion signal and a phosphatidylserine (PS) binding domain operably linked an immunostimulatory domain. Disclosed herein is a vector comprising an isolated nucleic acid molecule comprising a nucleic acid sequence encoding a chimeric fusion protein comprising a secretion signal, a phosphatidylserine (PS) binding domain, a linker, and an immunostimulatory domain. Disclosed herein is a vector comprising an isolated nucleic acid molecule comprising a nucleic acid sequence encoding a chimeric fusion protein comprising a secretion signal and a phosphatidylserine (PS) binding domain operably linked to an immunostimulatory domain, wherein the immunostimulatory domain further comprise a conjugated small molecule. Disclosed herein is a vector comprising an isolated nucleic acid molecule comprising a nucleic acid sequence encoding a chimeric fusion protein comprising a PS-binding domain operably linked to an IgG1 Fc domain. Disclosed herein is a vector comprising an isolated nucleic acid molecule comprising a nucleic acid sequence encoding a chimeric fusion protein comprising a PS-binding domain operably linked to an IgG1 Fc domain and an additional immunostimulatory domain. Disclosed herein is a vector comprising an isolated nucleic acid molecule comprising a nucleic acid sequence encoding a chimeric fusion protein comprising a PS-binding domain operably linked to an IgG1 Fc domain and an additional immunostimulatory domain, wherein the additional immunostimulatory domain comprises the IgV domain of SIRPα or the extracellular domain of NKG2D protein.

[0178] Disclosed herein is a vector comprising an isolated nucleic acid molecule comprising a nucleic acid sequence encoding a chimeric fusion protein comprising a PS-binding domain operably linked to a single-chain antibody (scFV) to a human CD3 protein. Disclosed herein is a vector comprising an isolated nucleic acid molecule comprising a nucleic acid sequence encoding a chimeric fusion protein comprising an Annexin-binding domain operably linked to a single-chain antibody (scFV) to a human CD3 protein. Disclosed herein is a vector comprising an isolated nucleic acid molecule comprising a nucleic acid sequence encoding a single-chain antibody (scFV) to a human CD3 protein and one or more additional immunostimulatory domains.

[0179] Disclosed herein is a vector comprising an isolated nucleic acid molecule comprising a nucleic acid sequence encoding a chimeric fusion protein comprising an Annexin-binding domain operably linked to a single-chain antibody (scFV) to a human CD3 protein and one or more additional immunostimulatory domains.

[0180] Disclosed herein is a vector comprising an isolated nucleic acid molecule comprising a nucleic acid sequence encoding a chimeric fusion protein comprising the sequence set forth in SEQ ID NO: SEQ ID NO:85, SEQ ID NO:86, SEQ ID NO:87, SEQ ID NO:88, SEQ ID NO:89, SEQ ID NO:90, SEQ ID NO:91, SEQ ID NO:92, SEQ ID NO:93, SEQ ID NO:94, SEQ ID NO:95, SEQ ID NO:96, SEQ ID NO:97, SEQ ID NO:99, SEQ ID NO:100, SEQ ID NO:101, SEQ ID NO:106, or a fragment thereof.

[0181] In an aspect, a disclosed vector can comprise a disclosed isolated nucleic acid molecule encoding a disclosed chimeric fusion protein having a structure set forth in FIG. 5A, FIG. 5B, FIG. 5C, FIG. 5D, FIG. 5E, FIG. 5F, or FIG. 5G. In an aspect, a disclosed chimeric fusion protein is bi-specific (e.g., PS binding domain and anti-CD3). In an aspect, a disclosed vector can comprise a disclosed isolated nucleic acid molecule encoding a disclosed chimeric fusion protein having a structure set forth in FIG. 5A, FIG. 5B, FIG. 5C, FIG. 5D, FIG. 5E, FIG. 5F, or FIG. 5G, wherein the PS-binding domain comprises any disclosed PS-binding domain and wherein the anti-CD3 binding domain comprises any disclosed binding domain. In an aspect, a disclosed bi-specific chimeric fusion protein can comprise a disclosed PS-binding domain and an anti-CD marker for hematological cancer (e.g., CD1a, CD2, CD3, CD4, CD5, CD7, CD8, CD9, CD10, CD11b, CD11c, CD13, CD14, CD15, CD16, CD19, CD20, CD22, CD23, CD25, CD26, CD30, CD33, CD34, CD36, CD38, CD41, CD43, CD45, CD45RA, CD45RO, CD52, CD56, CD58, CD61, CD64, CD71, CD79a, CD79b, CD103, CD117, CD123, CD138, or CD163).

[0182] In an aspect, a disclosed nucleic sequence can be a DNA sequence or an RNA sequence.

[0183] In an aspect, a disclosed vector can be used to introduce a disclosed isolated nucleic acid molecule or disclosed isolated nucleic acid sequence to one or more host cells. In an aspect, host cells are discussed infra. In an aspect, a disclosed cell can comprise T cells, NK cells, macrophages, or iPSCs. In an aspect, a disclosed cell can comprise any cell capable of generating a disclosed chimeric fusion protein.

[0184] In an aspect, a disclosed vector can be used to introduce a disclosed isolated nucleic acid molecule encoding of a disclosed chimeric fusion protein to one or more host cells. In an aspect, a disclosed vector can be used to introduce a disclosed isolated nucleic acid molecule encoding of a disclosed chimeric fusion protein to one or more T cells or NK cells or macrophages.

[0185] In an aspect, a disclosed vector can be an integrating vector or a non-integrating vector. In an aspect, integration can mean that the nucleotides of nucleic acid sequence can be stably inserted into the cellular genome (e.g., covalently linked to the nucleic acid sequence within the cell's chromosomal DNA).

[0186] In an aspect, a disclosed vector can be a viral vector or a non-viral vector. In an aspect, a disclosed non-viral vector can be a polymer-based vector, a peptide-based vector, a lipid nanoparticle, a solid lipid nanoparticle, or a cationic lipid-based vector.

[0187] In an aspect, a disclosed vector can be a transposon-based vector such as Sleeping Beauty and PiggyBac, both of which are known in the art. In an aspect, a first plasmid can be loaded with a disclosed nucleic acid sequence encoding a disclosed chimeric fusion protein, named transposon, surrounded by inverted repeats (IRs) that contain short direct repeats (DRs), while a second plasmid encodes the enzyme (transposase) that can recognize the sequences from the first plasmid and cut the transposon out of the first plasmid. Then the disclosed sequence encoded a disclosed chimeric fusion protein can be successfully delivered into the targeted cell (e.g., a T cell or a NK cell or a macrophage) cytoplasm and inserted randomly into TA dinucleotide base pairs of the recipient DNA sequence.

[0188] In an aspect, a disclosed vector can comprise lipid and/or polymer-based nanoparticles loaded with mRNA encoding a disclosed chimeric fusion protein. In an aspect, a disclosed vector can comprise lipid and/or polymer-based nanoparticles loaded with transposon-based plasmids such as, for example, transposon-based plasmids comprising a sequence encoding a disclosed chimeric fusion protein. In an aspect, a disclosed vector can comprise mRNA encoding a disclosed chimeric fusion protein. In an aspect, a disclosed vector can comprise lipid and/or polymer-based nanoparticles loaded with mRNA encoding a disclosed chimeric fusion protein.

[0189] In an aspect, a disclosed viral vector can be an adenovirus vector, an AAV vector, a herpes simplex virus vector, a retrovirus vector, a lentivirus vector, and alphavirus vector, a flavivirus vector, a rhabdovirus vector, a measles virus vector, a Newcastle disease viral vector, a poxvirus vector, or a picornavirus vector. In an aspect, a disclosed viral vector can be an adeno-associated virus (AAV) vector. In an aspect, a disclosed AAV vector can include naturally isolated serotypes including, but not limited to, AAV1, AAV2, AAV3 (including 3a and 3b), AAV4, AAV5, AAV6, AAV7, AAV8, AAVrh8, AAV9, AAV10, AAVrh10, AAV11, AAV12, AAV13, AAVrh39, AAVrh43, AAVcy.7 as well as bovine AAV, caprine AAV, canine AAV, equine AAV, ovine AAV, avian AAV, primate AAV, non-primate AAV, and any other virus classified by the International Committee on Taxonomy of Viruses (ICTV) as an AAV. In an aspect, an AAV capsid can be a chimera either created by capsid evolution or by rational capsid engineering from a naturally isolated AAV variants to capture desirable serotype features such as enhanced or specific tissue tropism and/or a host immune response escape. Naturally isolated AAV variants include, but not limited to, AAV-DJ, AAV-HAE1, AAV-HAE2, AAVM41, AAV-1829, AAV2 Y/F, AAV2 T/V, AAV2i8, AAV2.5, AAV9.45, AAV9.61, AAV-B1, AAV-AS, AAV9.45A-String (e.g., AAV9.45-AS), AAV9.45Angiopep, AAV9.47-Angiopep, and AAV9.47-AS, AAV-PHP.B, AAV-PHP.eB, AAV-PHP.S, AAV-F, AAVcc.47, and AAVcc.81. In an aspect, a disclosed AAV vector can be AAV-Rh74 or a related variant (e.g., capsid variants like RHM4-1). In an aspect, a disclosed AAV vector can be a self-complementary AAV as disclosed herein.

[0190] In an aspect, a disclosed vector can be a recombinant vector comprising a disclosed nucleic acid sequence. Recombinant vectors (such as recombinant viral vectors) are known to the art.

[0191] In an aspect, a disclosed promoter can comprise a ubiquitous promoter, a constitutive promoter, or a tissue specific promoter. In an aspect, a disclosed promoter can be operably linked to a disclosed nucleic acid sequence encoding a disclosed chimeric fusion protein. In an aspect, a disclosed promoter can be operably linked to a disclosed nucleic acid sequence encoding a disclosed tumor antigen. Promoters are known to the art. In an aspect, a disclosed promoter can be a promoter/enhancer. Promoter/enhancers are known to the art. In an aspect, a disclosed promoter can be an endogenous promoter. In an aspect, a disclosed endogenous promoter can be an endogenous promoter/enhancer. In an aspect, a disclosed promoter or a disclosed promoter/enhancer can be used for constitutive and efficient expression of a disclosed chimeric fusion protein. In an aspect, a disclosed promoter or a disclosed promoter/enhancer can be used for constitutive and efficient expression of a disclosed tumor antigen. In an aspect, a disclosed vector can be used to engineer cells to express a disclosed chimeric fusion protein.

[0192] In an aspect, a disclosed vector can stimulate an effector cell mediated immune modulator response to PS-expressing tumor cells. In an aspect, a disclosed vector can induce a tumor reducing immune response. In an aspect, a disclosed vector can induce phagocytosis of cancer cells in the subject. In an aspect, a disclosed vector can cross-prime an anti-tumor T cell response. In an aspect, a disclosed vector can induce a tumor eliminating immune response. In an aspect, a disclosed vector can treat cancer.

[0193] In an aspect, a disclosed vector can induce cell death in the targeted cell. In an aspect, a disclosed vector can stimulate an effector cell mediated immune modulator response to PS-expressing tumor cells. In an aspect, a disclosed vector can induce a tumor reducing immune response. In an aspect, a disclosed vector can induce phagocytosis of cancer cells in the subject. In an aspect, a disclosed vector can cross-prime an anti-tumor T cell response. In an aspect, a disclosed vector can induce a tumor eliminating immune response. In an aspect, a disclosed ADC can treat cancer. In an aspect, a disclosed vector can improve and/or extend the survivability of the subject, can improve a subject's quality of life, can increase and/or prolong a subject's life span, or any combination thereof.

### 5. Plasmids

[0194] Disclosed herein is a plasmid comprising a disclosed isolated nucleic acid molecule. Disclosed herein is a plasmid comprising a disclosed nucleic acid sequence. Disclosed herein is a plasmid comprising an isolated nucleic molecule comprising a nucleic acid sequence encoding one or more disclosed chimeric fusion proteins. Disclosed herein is a plasmid comprising an isolated nucleic acid molecule comprising a nucleic acid sequence encoding a chimeric fusion protein comprising a phosphatidylserine (PS) binding domain. Disclosed herein is a plasmid comprising an isolated nucleic acid molecule comprising a nucleic acid sequence encoding a chimeric fusion protein comprising a phosphatidylserine (PS) binding domain and an immunostimulatory domain.

[0195] Disclosed herein is a plasmid comprising an isolated nucleic acid molecule comprising a nucleic acid sequence encoding a chimeric fusion protein comprising a phosphatidylserine (PS) binding domain operably linked an immunostimulatory domain. Disclosed herein is a plasmid comprising an isolated nucleic acid molecule comprising a nucleic acid sequence encoding a phosphatidylserine (PS) binding domain, a linker, and an immunostimulatory domain. Disclosed herein is a plasmid comprising an isolated nucleic acid molecule comprising a nucleic acid sequence encoding a chimeric fusion protein comprising a phosphatidylserine (PS) binding domain operably linked to an immunostimulatory domain, wherein the immunostimulatory domain further comprise a conjugated small molecule. Disclosed herein is a plasmid comprising an isolated nucleic acid molecule comprising a nucleic acid sequence encoding a chimeric fusion protein comprising a secretion signal and a phosphatidylserine (PS) binding domain.

[0196] Disclosed herein is a plasmid comprising an isolated nucleic acid molecule comprising a nucleic acid sequence encoding a chimeric fusion protein comprising a secretion signal, a phosphatidylserine (PS) binding domain, and an immunostimulatory domain. Disclosed herein is a plasmid comprising an isolated nucleic acid molecule comprising a nucleic acid sequence encoding a chimeric fusion protein comprising a secretion signal and a phosphatidylserine (PS) binding domain operably linked an immunostimulatory domain. Disclosed herein is a plasmid comprising an isolated nucleic acid molecule comprising a nucleic acid sequence encoding a chimeric fusion protein comprising a secretion signal, a phosphatidylserine (PS) binding domain, a linker, and an immunostimulatory domain. Disclosed herein is a plasmid comprising an isolated nucleic acid molecule comprising a nucleic acid sequence encoding a chimeric fusion protein comprising a secretion signal and a phosphatidylserine (PS) binding domain operably linked to an immunostimulatory domain, wherein the immunostimulatory domain further comprise a conjugated small molecule.

[0197] Disclosed herein is a plasmid comprising an isolated nucleic acid molecule comprising a nucleic acid sequence encoding a chimeric fusion protein comprising a PS-binding domain operably linked to an IgG1 Fc domain. Disclosed herein is a plasmid comprising an isolated nucleic acid molecule comprising a nucleic acid sequence encoding a chimeric fusion protein comprising a PS-binding domain operably linked to an IgG1 Fc domain and an additional immunostimulatory domain. Disclosed herein is a plasmid comprising an isolated nucleic acid molecule comprising a nucleic acid sequence encoding a chimeric fusion protein comprising a PS-binding domain operably linked to an IgG1 Fc domain and an additional immunostimulatory domain, wherein the additional immunostimulatory domain comprises the IgV domain of SIRPα or the extracellular domain of NKG2D protein. Disclosed herein is a plasmid comprising an isolated nucleic acid molecule comprising a nucleic acid sequence encoding a chimeric fusion protein comprising a PS-binding domain operably linked to a single-chain antibody (scFV) to a human CD3 protein. Disclosed herein is a plasmid comprising an isolated nucleic acid molecule comprising a nucleic acid sequence encoding a chimeric fusion protein comprising an Annexin-binding domain operably linked to a single-chain antibody (scFV) to a human CD3 protein. Disclosed herein is a plasmid comprising an isolated nucleic acid molecule comprising a nucleic acid sequence encoding a single-chain antibody (scFV) to a human CD3 protein and one or more additional immunostimulatory domains. Disclosed herein is a plasmid comprising an isolated nucleic acid molecule comprising a nucleic acid sequence encoding a chimeric fusion protein comprising an Annexin-binding domain operably linked to a single-chain antibody (scFV) to a human CD3 protein and one or more additional immunostimulatory domains.

[0198] Disclosed herein is a plasmid comprising an isolated nucleic acid molecule comprising a nucleic acid sequence encoding a chimeric fusion protein comprising the sequence set forth in SEQ ID NO: SEQ ID NO:85, SEQ ID NO:86, SEQ ID NO:87, SEQ ID NO:88, SEQ ID NO:89, SEQ ID NO:90, SEQ ID NO:91, SEQ ID NO:92, SEQ ID NO:93, SEQ ID NO:94, SEQ ID NO:95, SEQ ID NO:96, SEQ ID NO:97, SEQ ID NO:99, SEQ ID NO:100, SEQ ID NO:101, SEQ ID NO:106, or a fragment thereof.

[0199] Disclosed herein is a plasmid comprising an isolated nucleic acid molecule comprising a nucleic acid sequence encoding a bi-specific chimeric fusion protein having the structure set forth in FIG. 5A, FIG. 5B, FIG. 5C, FIG. 5D, FIG. 5E, FIG. 5F, or FIG. 5G. In an aspect, a disclosed chimeric fusion protein is bi-specific (e.g., PS binding domain and anti-CD3). In an aspect, a disclosed plasmid can comprise an isolated nucleic acid molecule comprising a nucleic acid sequence encoding a disclosed chimeric fusion protein having a structure set forth in FIG. 5A, FIG. 5B, FIG. 5C, FIG. 5D, FIG. 5E, FIG. 5F, or FIG. 5G, wherein the PS-binding domain comprises any disclosed PS-binding domain and wherein the anti-CD3 binding domain comprises any disclosed binding domain. In an aspect, a disclosed bi-specific chimeric fusion protein can comprise a disclosed PS-binding domain and an anti-CD marker for hematological cancer (e.g., CD1a, CD2, CD3, CD4, CD5, CD7, CD8, CD9, CD10, CD11b, CD11c, CD13, CD14, CD15, CD16, CD19, CD20, CD22, CD23, CD25, CD26, CD30, CD33, CD34, CD36, CD38, CD41, CD43, CD45, CD45RA, CD45RO, CD52, CD56, CD58, CD61, CD64, CD71, CD79a, CD79b, CD103, CD117, CD123, CD138, or CD163).

[0200] In an aspect, a disclosed plasmid can be used to introduce a disclosed isolated nucleic acid molecule or disclosed isolated nucleic acid sequence to one or more host cells. In an aspect, host cells are discussed infra. In an aspect, a disclosed cell can comprise T cells, NK cells, macrophages, or iPSCs. In an aspect, a disclosed cell can comprise any cell capable of generating a disclosed chimeric fusion protein.

[0201] In an aspect, a disclosed plasmid can be used to introduce a disclosed isolated nucleic acid molecule encoding a disclosed chimeric fusion protein or disclosed isolated nucleic acid sequence encoding a disclosed isolated nucleic acid molecule to one or more host cells.

[0202] In an aspect, a disclosed plasmid can be used to introduce a disclosed isolated nucleic acid molecule or disclosed isolated nucleic acid sequence to one or more T cells or NK cells or macrophages. In an aspect, a disclosed plasmid can be used to introduce a disclosed isolated nucleic acid molecule or a disclosed isolated nucleic sequence to one or more cells comprise any cell capable of generating a disclosed chimeric fusion protein.

[0203] In an aspect, a disclosed plasmid can be used to introduce a disclosed isolated nucleic acid molecule encoding a disclosed isolated nucleic acid molecule or disclosed isolated nucleic acid sequence encoding a disclosed isolated nucleic acid molecule to one or more T cells or NK cells or macrophages. In an aspect, a disclosed plasmid can be used to introduce a disclosed isolated nucleic acid molecule encoding a disclosed isolated nucleic acid molecule or disclosed isolated nucleic acid sequence encoding a disclosed isolated nucleic acid molecule to one or more cells comprise any cell capable of generating a disclosed chimeric fusion protein.

[0204] In an aspect, a disclosed plasmid can be an integrating vector or a non-integrating vector. In an aspect, integration can mean that the nucleotides of nucleic acid sequence can be stably inserted into the cellular genome (e.g., covalently linked to the nucleic acid sequence within the cell's chromosomal DNA).

[0205] In an aspect, a disclosed plasmid can be a recombinant vector comprising a disclosed nucleic acid sequence. Recombinant plasmids are known to the art.

[0206] In an aspect, a disclosed promoter can comprise a ubiquitous promoter, a constitutive promoter, or a tissue specific promoter. In an aspect, a disclosed promoter can be operably linked to a disclosed nucleic acid sequence encoding a disclosed chimeric fusion protein. In an aspect, a disclosed promoter can be operably linked to a disclosed nucleic acid sequence encoding a disclosed tumor antigen. Promoters are known to the art. In an aspect, a disclosed promoter can be a promoter/enhancer. Promoter/enhancers are known to the art. In an aspect, a disclosed promoter can be an endogenous promoter. In an aspect, a disclosed endogenous promoter can be an endogenous promoter/enhancer. In an aspect, a disclosed promoter or a disclosed promoter/enhancer can be used for constitutive and efficient expression of a disclosed isolated nucleic acid molecule. In an aspect, a disclosed promoter or a disclosed promoter/enhancer can be used for constitutive and efficient expression of a disclosed tumor antigen. In an aspect, a disclosed plasmid can be used to engineer cells to express a disclosed chimeric fusion protein.

[0207] In an aspect, a disclosed vector can be a viral vector or a non-viral vector. In an aspect, a disclosed non-viral vector can be a polymer-based vector, a peptide-based vector, a lipid nanoparticle, a solid lipid nanoparticle, or a cationic lipid-based vector.

[0208] In an aspect, a disclosed plasmid can comprise a transposon such as, for example, Sleeping Beauty and PiggyBac, both of which are known in the art. In an aspect, a first plasmid can be loaded with a disclosed nucleic acid sequence encoding a disclosed chimeric fusion protein, named transposon, surrounded by inverted repeats (IRs) that contain short direct repeats (DRs), while a second plasmid encodes the enzyme (transposase) that can recognize the sequences from the first plasmid and cut the transposon out of the first plasmid. Then the sequence encoding a disclosed chimeric fusion protein can be successfully delivered into the targeted cell (e.g., a T cell or a NK cell or a macrophage) cytoplasm and inserted randomly into TA dinucleotide base pairs of the recipient DNA sequence.

[0209] In an aspect, a disclosed plasmid can stimulate an effector cell mediated immune modulator response to PS-expressing tumor cells. In an aspect, a disclosed plasmid can induce a tumor reducing immune response. In an aspect, a disclosed plasmid can induce phagocytosis of cancer cells in the subject. In an aspect, a disclosed plasmid can cross-prime an anti-tumor T cell response. In an aspect, a disclosed plasmid can induce a tumor eliminating immune response. In an aspect, a disclosed plasmid can treat cancer. In an aspect, a disclosed plasmid can effect cell death of PS-expression cells. In an aspect, a disclosed plasmid can comprise improving the efficacy of one or more anti-cancer therapies and/or treatments.

[0210] In an aspect, a disclosed plasmid can be used to validate the efficacy and/or toxicity of disclosed chimeric fusion protein or pharmaceutical formulation thereof. In an aspect, validating the efficacy and/or toxicity of a disclosed chimeric fusion protein or pharmaceutical formulation thereof can comprise using an in vivo model and/or in vitro model.

### 6. Cells

[0211] Disclosed herein are cells transformed or transfected by one or more disclosed isolated nucleic acid molecules. Disclosed herein are cells transformed or transfected by an isolated nucleic acid molecule comprising a nucleic acid sequence encoding a disclosed chimeric fusion protein. Disclosed herein are cells transformed or transfected by an isolated nucleic acid molecule comprising a nucleic acid sequence encoding a disclosed chimeric fusion protein specific for phosphatidylserine (PS). Disclosed herein are cells transformed or transfected by an isolated nucleic acid molecule comprising a nucleic acid sequence encoding a chimeric fusion protein comprising a phosphatidylserine (PS) binding domain. Disclosed herein are cells transformed or transfected by an isolated nucleic acid molecule comprising a nucleic acid sequence encoding a chimeric fusion protein comprising a phosphatidylserine (PS) binding domain and an immunostimulatory domain. Disclosed herein are cells transformed or transfected by an isolated nucleic acid molecule comprising a nucleic acid sequence encoding a chimeric fusion protein comprising a phosphatidylserine (PS) binding domain operably linked an immunostimulatory domain. Disclosed herein are cells transformed or transfected by an isolated nucleic acid molecule comprising a nucleic acid sequence encoding a phosphatidylserine (PS) binding domain, a linker, and an immunostimulatory domain. Disclosed herein are cells transformed or transfected by an isolated nucleic acid molecule comprising a nucleic acid sequence encoding a chimeric fusion protein comprising a phosphatidylserine (PS) binding domain operably linked to an immunostimulatory domain, wherein the immunostimulatory domain further comprise a conjugated small molecule.

[0212] Disclosed herein are cells transformed or transfected by an isolated nucleic acid molecule comprising a nucleic acid sequence encoding a chimeric fusion protein comprising a secretion signal and a phosphatidylserine (PS) binding domain. Disclosed herein are cells transformed or transfected by an isolated nucleic acid molecule comprising a nucleic acid sequence encoding a chimeric fusion protein comprising a secretion signal, a phosphatidylserine (PS) binding domain, and an immunostimulatory domain. Disclosed herein are cells transformed or transfected by an isolated nucleic acid molecule comprising a nucleic acid sequence encoding a chimeric fusion protein comprising a secretion signal and a phosphatidylserine (PS) binding domain operably linked an immunostimulatory domain.

[0213] Disclosed herein are cells transformed or transfected by an isolated nucleic acid molecule comprising a nucleic acid sequence encoding a chimeric fusion protein comprising a secretion signal, a phosphatidylserine (PS) binding domain, a linker, and an immunostimulatory domain.

[0214] Disclosed herein are cells transformed or transfected by an isolated nucleic acid molecule comprising a nucleic acid sequence encoding a chimeric fusion protein comprising a secretion signal and a phosphatidylserine (PS) binding domain operably linked to an immunostimulatory domain, wherein the immunostimulatory domain further comprise a conjugated small molecule.

[0215] Disclosed herein are cells transformed or transfected by an isolated nucleic acid molecule comprising a nucleic acid sequence encoding a chimeric fusion protein comprising a PS-binding domain operably linked to an IgG1 Fc domain. Disclosed herein are cells transformed or transfected by an isolated nucleic acid molecule comprising a nucleic acid sequence encoding a chimeric fusion protein comprising a PS-binding domain operably linked to an IgG1 Fc domain and an additional immunostimulatory domain. Disclosed herein are cells transformed or transfected by an isolated nucleic acid molecule comprising a nucleic acid sequence encoding a chimeric fusion protein comprising a PS-binding domain operably linked to an IgG1 Fc domain and an additional immunostimulatory domain, wherein the additional immunostimulatory domain comprises the IgV domain of SIRPα or the extracellular domain of NKG2D protein.

[0216] Disclosed herein are cells transformed or transfected by an isolated nucleic acid molecule comprising a nucleic acid sequence encoding a chimeric fusion protein comprising a PS-binding domain operably linked to a single-chain antibody (scFV) to a human CD3 protein.

[0217] Disclosed herein are cells transformed or transfected by an isolated nucleic acid molecule comprising a nucleic acid sequence encoding a chimeric fusion protein comprising an Annexin-binding domain operably linked to a single-chain antibody (scFV) to a human CD3 protein.

[0218] Disclosed herein are cells transformed or transfected by an isolated nucleic acid molecule comprising a nucleic acid sequence encoding a single-chain antibody (scFV) to a human CD3 protein and one or more additional immunostimulatory domains.

[0219] Disclosed herein are cells transformed or transfected by an isolated nucleic acid molecule comprising a nucleic acid sequence encoding a chimeric fusion protein comprising an Annexin-binding domain operably linked to a single-chain antibody (scFV) to a human CD3 protein and one or more additional immunostimulatory domains.

[0220] Disclosed herein are cells transformed or transfected by an isolated nucleic acid molecule comprising a nucleic acid sequence encoding a chimeric fusion protein comprising the sequence set forth in SEQ ID NO: SEQ ID NO:85, SEQ ID NO:86, SEQ ID NO:87, SEQ ID NO:88, SEQ ID NO:89, SEQ ID NO:90, SEQ ID NO:91, SEQ ID NO:92, SEQ ID NO:93, SEQ ID NO:94, SEQ ID NO:95, SEQ ID NO:96, SEQ ID NO:97, SEQ ID NO:99, SEQ ID NO:100, SEQ ID NO:101, SEQ ID NO:106, or a fragment thereof.

[0221] Disclosed herein are cells transduced by one or more disclosed viral vectors. Disclosed herein are cells transduced by a vector comprising a disclosed isolated nucleic acid molecule. Disclosed herein are cells transduced by a vector comprising a vector comprising an isolated nucleic acid molecule comprising a nucleic acid sequence encoding one or more disclosed chimeric fusion proteins. Disclosed herein are cells transduced by a vector comprising an isolated nucleic acid molecule comprising a nucleic acid sequence encoding a chimeric fusion protein comprising a phosphatidylserine (PS) binding domain. Disclosed herein are cells transduced by a vector comprising an isolated nucleic acid molecule comprising a nucleic acid sequence encoding a chimeric fusion protein comprising a phosphatidylserine (PS) binding domain and an immunostimulatory domain.

[0222] Disclosed herein are cells transduced by a vector comprising an isolated nucleic acid molecule comprising a nucleic acid sequence encoding a chimeric fusion protein comprising a phosphatidylserine (PS) binding domain operably linked an immunostimulatory domain. Disclosed herein are cells transduced by a vector comprising an isolated nucleic acid molecule comprising a nucleic acid sequence encoding a phosphatidylserine (PS) binding domain, a linker, and an immunostimulatory domain. Disclosed herein are cells transduced by a vector comprising an isolated nucleic acid molecule comprising a nucleic acid sequence encoding a chimeric fusion protein comprising a phosphatidylserine (PS) binding domain operably linked to an immunostimulatory domain, wherein the immunostimulatory domain further comprise a conjugated small molecule.

[0223] Disclosed herein are cells transduced by a vector comprising an isolated nucleic acid molecule comprising a nucleic acid sequence encoding a chimeric fusion protein comprising a secretion signal and a phosphatidylserine (PS) binding domain. Disclosed herein are cells transduced by a vector comprising an isolated nucleic acid molecule comprising a nucleic acid sequence encoding a chimeric fusion protein comprising a secretion signal, a phosphatidylserine (PS) binding domain, and an immunostimulatory domain.

[0224] Disclosed herein are cells transduced by a vector comprising an isolated nucleic acid molecule comprising a nucleic acid sequence encoding a chimeric fusion protein comprising a secretion signal and a phosphatidylserine (PS) binding domain operably linked an immunostimulatory domain. Disclosed herein are cells transduced by a vector comprising an isolated nucleic acid molecule comprising a nucleic acid sequence encoding a chimeric fusion protein comprising a secretion signal, a phosphatidylserine (PS) binding domain, a linker, and an immunostimulatory domain. Disclosed herein are cells transduced by a vector comprising an isolated nucleic acid molecule comprising a nucleic acid sequence encoding a chimeric fusion protein comprising a secretion signal and a phosphatidylserine (PS) binding domain operably linked to an immunostimulatory domain, wherein the immunostimulatory domain further comprise a conjugated small molecule.

[0225] Disclosed herein are cells transduced by a vector comprising an isolated nucleic acid molecule comprising a nucleic acid sequence encoding a chimeric fusion protein comprising a PS-binding domain operably linked to an IgG1 Fc domain. Disclosed herein are cells transduced by a vector comprising an isolated nucleic acid molecule comprising a nucleic acid sequence encoding a chimeric fusion protein comprising a PS-binding domain operably linked to an IgG1 Fc domain and an additional immunostimulatory domain. Disclosed herein are cells transduced by a vector comprising an isolated nucleic acid molecule comprising a nucleic acid sequence encoding a chimeric fusion protein comprising a PS-binding domain operably linked to an IgG1 Fc domain and an additional immunostimulatory domain, wherein the additional immunostimulatory domain comprises the IgV domain of SIRPα or the extracellular domain of NKG2D protein.

[0226] Disclosed herein are cells transduced by a vector comprising an isolated nucleic acid molecule comprising a nucleic acid sequence encoding a chimeric fusion protein comprising a PS-binding domain operably linked to a single-chain antibody (scFV) to a human CD3 protein. Disclosed herein are cells transduced by a vector comprising an isolated nucleic acid molecule comprising a nucleic acid sequence encoding a chimeric fusion protein comprising an Annexin-binding domain operably linked to a single-chain antibody (scFV) to a human CD3 protein. Disclosed herein are cells transduced by a vector comprising an isolated nucleic acid molecule comprising a nucleic acid sequence encoding a single-chain antibody (scFV) to a human CD3 protein and one or more additional immunostimulatory domains. Disclosed herein are cells transduced by a vector comprising an isolated nucleic acid molecule comprising a nucleic acid sequence encoding a chimeric fusion protein comprising an Annexin-binding domain operably linked to a single-chain antibody (scFV) to a human CD3 protein and one or more additional immunostimulatory domains.

[0227] Disclosed herein are cells transduced by a vector comprising an isolated nucleic acid molecule comprising a nucleic acid sequence encoding a chimeric fusion protein comprising the sequence set forth in SEQ ID NO:85, SEQ ID NO:86, SEQ ID NO:87, SEQ ID NO:88, SEQ ID NO:89, SEQ ID NO:90, SEQ ID NO:91, SEQ ID NO:92, SEQ ID NO:93, SEQ ID NO:94, SEQ ID NO:95, SEQ ID NO:96, SEQ ID NO:97, SEQ ID NO:99, SEQ ID NO:100, SEQ ID NO:101, SEQ ID NO:106, or a fragment thereof.

[0228] Disclosed herein is a cell expressing a disclosed chimeric fusion protein, wherein the chimeric fusion protein an anti-PS binding domain, wherein the binding domain comprises Annexin A1 (ANXA1) or the PS-binding core domain, Annexin A2 (ANXA1), Annexin A3 (ANXA1), Annexin A4 (ANXA1), Annexin A5 (ANXA1), Annexin A6 (ANXA1), Annexin A7 (ANXA1), Annexin A8 (ANXA1), Annexin A8 Like 1 (ANXA1), Annexin A9 (ANXA1), Annexin A10 (ANXA1), Annexin A11 (ANXA1), Annexin A13 (ANXA1), Adhesion G Protein Coupled Receptor B1 (ADGRB1) or the extracellular domain thereof, Apolipoprotein H (APO-H), Coagulation Factor II (F2), Coagulation Factor VII (F7), Coagulation Factor IX (F9), Coagulation Factor X (F10), Growth Arrest Specific 6 (CAS6), Milk Fat Globule EGF And Factor V/VIII Domain Containing (MFGE8), Advanced Glycosylation End-Product Specific Receptor (AGER) or the extracellular domain thereof, Jumonji Domain-Containing Protein 6 (JMJD6); Protein S (PROS1), Hepatitis A Virus Cellular Receptor 1 (HAVCR1) or the extracellular domain thereof, Hepatitis A Virus Cellular Receptor 2 (HAVCR2) or the extracellular domain thereof, T Cell Immunoglobulin and Mucin Domain Containing (TIM-3) or the extracellular domain thereof, Protein Kinase C Alpha (PRKCA) or the C2 domain thereof, Synaptotagmin (SYT1) or the C2A domain thereof, Stabilin-1 (STAB1) or the extracellular domain thereof, Stabilin-2 (STAB2) or the extracellular domain thereof, or any combination thereof.

[0229] In an aspect, a disclosed cell can be transformed or transfected by an isolated nucleic acid molecule comprising a nucleic acid sequence encoding a tumor antigen. In an aspect, a disclosed cell can be transduced by a vector comprising an isolated nucleic acid molecule comprising a nucleic acid sequence encoding a disclosed chimeric fusion protein. In an aspect, following transformation, transfection, and/or transduction, a disclosed cell can express a disclosed chimeric fusion protein.

[0230] In an aspect, disclosed cells can comprise T cells or NK cells or macrophages. In an aspect, disclosed cells are immune cells. In an aspect, disclosed cells can comprise T cells, B cells, natural killer (NK) cells, dendritic cells, granulocytes, innate lymphoid cells, megakaryocytes, monocytes, macrophages, platelets, thymocytes, myeloid cells, or any combination thereof. In an aspect, disclosed cells can comprise any cell capable of generating a disclosed chimeric fusion protein. In an aspect, disclosed T cells and NK cells can be differentiated in vitro from a hematopoietic stem cell population (for example iPSCs) or can be obtained from a subject. In an aspect, T cells and NK cells can be obtained from, for example, peripheral blood mononuclear cells (PBMCs), bone marrow, lymph node tissue, cord blood, thymus tissue, tissue from a site of infection, ascites, pleural effusion, spleen tissue, tumors, or any combination thereof. In an aspect, disclosed T cells can be derived from one or more T cell lines available in the art. In an aspect, disclosed T cells can also be obtained from a unit of blood collected from a subject using any number of techniques known to the skilled person.

[0231] In an aspect, following transformation, transfection, and/or transduction, disclosed host cells can be used to generate a disclosed chimeric fusion protein.

### 7. Pharmaceutical Formulations

[0232] Disclosed herein is a pharmaceutical formulation comprising one or more chimeric fusion proteins, and one or more pharmaceutically acceptable carriers. Disclosed herein is a pharmaceutical formulation comprising one or more chimeric fusion proteins comprising a phosphatidylserine (PS) binding domain, and one or more pharmaceutically acceptable carriers. Disclosed herein is a pharmaceutical formulation comprising a chimeric fusion protein comprising a phosphatidylserine (PS) binding domain and an immunostimulatory domain, and one or more pharmaceutically acceptable carriers. Disclosed herein is a pharmaceutical formulation comprising a chimeric fusion protein comprising a phosphatidylserine (PS) binding domain operably linked an immunostimulatory domain, and one or more pharmaceutically acceptable carriers. Disclosed herein is a pharmaceutical formulation comprising a chimeric fusion protein comprising a phosphatidylserine (PS) binding domain, a linker, and an immunostimulatory domain, and one or more pharmaceutically acceptable carriers. Disclosed herein is a pharmaceutical formulation comprising a chimeric fusion protein comprising a phosphatidylserine (PS) binding domain operably linked to an immunostimulatory domain, wherein the immunostimulatory domain further comprise a conjugated small molecule, and one or more pharmaceutically acceptable carriers.

[0233] Disclosed herein is a pharmaceutical formulation comprising one or more chimeric fusion proteins comprising a secretion signal and a phosphatidylserine (PS) binding domain, and one or more pharmaceutically acceptable carriers. Disclosed herein is a pharmaceutical formulation comprising a chimeric fusion protein comprising a secretion signal, a phosphatidylserine (PS) binding domain, and an immunostimulatory domain, and one or more pharmaceutically acceptable carriers.

[0234] Disclosed herein is a pharmaceutical formulation comprising a chimeric fusion protein comprising a secretion signal and a phosphatidylserine (PS) binding domain operably linked an immunostimulatory domain, and one or more pharmaceutically acceptable carriers. Disclosed herein is a pharmaceutical formulation comprising a chimeric fusion protein comprising a secretion signal, a phosphatidylserine (PS) binding domain, a linker, and an immunostimulatory domain, and one or more pharmaceutically acceptable carriers. Disclosed herein is a pharmaceutical formulation comprising a chimeric fusion protein comprising a secretion signal and a phosphatidylserine (PS) binding domain operably linked to an immunostimulatory domain, wherein the immunostimulatory domain further comprise a conjugated small molecule, and one or more pharmaceutically acceptable carriers.

[0235] Disclosed herein is a pharmaceutical formulation comprising a chimeric fusion protein comprising a PS-binding domain operably linked to an IgG1 Fc domain, and one or more pharmaceutically acceptable carriers. Disclosed herein is a pharmaceutical formulation comprising a chimeric fusion protein comprising a PS-binding domain operably linked to an IgG1 Fc domain and an additional immunostimulatory domain, and one or more pharmaceutically acceptable carriers. Disclosed herein is a pharmaceutical formulation comprising a chimeric fusion protein comprising a PS-binding domain operably linked to an IgG1 Fc domain and an additional immunostimulatory domain, wherein the additional immunostimulatory domain comprises the IgV domain of SIRPα or the extracellular domain of NKG2D protein, and one or more pharmaceutically acceptable carriers. Disclosed herein is a pharmaceutical formulation comprising a chimeric fusion protein comprising a PS-binding domain operably linked to a single-chain antibody (scFV) to a human CD3 protein, and one or more pharmaceutically acceptable carriers. Disclosed herein is a pharmaceutical formulation comprising a chimeric fusion protein comprising an Annexin-binding domain operably linked to a single-chain antibody (scFV) to a human CD3 protein, and one or more pharmaceutically acceptable carriers. Disclosed herein is a pharmaceutical formulation comprising a chimeric fusion protein comprising a PS-binding domain operably linked to a single-chain antibody (scFV) to a human CD3 protein and one or more additional immunostimulatory domains, and one or more pharmaceutically acceptable carriers.

[0236] Disclosed herein is a pharmaceutical formulation comprising a chimeric fusion protein comprising an Annexin-binding domain operably linked to a single-chain antibody (scFV) to a human CD3 protein and one or more additional immunostimulatory domains, and one or more pharmaceutically acceptable carriers.

[0237] Disclosed herein is a pharmaceutical formulation comprising a chimeric fusion protein comprising the sequence set forth in SEQ ID NO:85, SEQ ID NO:86, SEQ ID NO:87, SEQ ID NO:88, SEQ ID NO:89, SEQ ID NO:90, SEQ ID NO:91, SEQ ID NO:92, SEQ ID NO:93, SEQ ID NO:94, SEQ ID NO:95, SEQ ID NO: 96, SEQ ID NO:97, SEQ ID NO:99, SEQ ID NO:100, SEQ ID NO:101, SEQ ID NO:106, or a fragment thereof, and one or more pharmaceutically acceptable carriers.

[0238] Disclosed herein is a pharmaceutical formulation comprising one or more isolated nucleic acid molecules comprising a nucleic acid sequence encoding one or more disclosed chimeric fusion proteins, and one or more pharmaceutically acceptable carriers. Disclosed herein is a pharmaceutical formulation comprising an isolated nucleic acid molecule comprising a nucleic acid sequence encoding a chimeric fusion protein comprising a phosphatidylserine (PS) binding domain, and one or more pharmaceutically acceptable carriers. Disclosed herein is a pharmaceutical formulation comprising an isolated nucleic acid molecule comprising a nucleic acid sequence encoding a chimeric fusion protein comprising a phosphatidylserine (PS) binding domain and an immunostimulatory domain, and one or more pharmaceutically acceptable carriers.

[0239] Disclosed herein is a pharmaceutical formulation comprising an isolated nucleic acid molecule comprising a nucleic acid sequence encoding a chimeric fusion protein comprising a phosphatidylserine (PS) binding domain operably linked an immunostimulatory domain, and one or more pharmaceutically acceptable carriers. Disclosed herein is a pharmaceutical formulation comprising an isolated nucleic acid molecule comprising a nucleic acid sequence encoding a phosphatidylserine (PS) binding domain, a linker, and an immunostimulatory domain, and one or more pharmaceutically acceptable carriers. Disclosed herein is a pharmaceutical formulation comprising an isolated nucleic acid molecule comprising a nucleic acid sequence encoding a chimeric fusion protein comprising a phosphatidylserine (PS) binding domain operably linked to an immunostimulatory domain, wherein the immunostimulatory domain further comprise a conjugated small molecule, and one or more pharmaceutically acceptable carriers.

[0240] Disclosed herein is a pharmaceutical formulation comprising an isolated nucleic acid molecule comprising a nucleic acid sequence encoding a chimeric fusion protein comprising a secretion signal and a phosphatidylserine (PS) binding domain, and one or more pharmaceutically acceptable carriers.

[0241] Disclosed herein is a pharmaceutical formulation comprising an isolated nucleic acid molecule comprising a nucleic acid sequence encoding a chimeric fusion protein comprising a secretion signal, a phosphatidylserine (PS) binding domain, and an immunostimulatory domain.

[0242] Disclosed herein is a pharmaceutical formulation comprising an isolated nucleic acid molecule comprising a nucleic acid sequence encoding a chimeric fusion protein comprising a secretion signal and a phosphatidylserine (PS) binding domain operably linked an immunostimulatory domain, and one or more pharmaceutically acceptable carriers.

[0243] Disclosed herein is a pharmaceutical formulation comprising an isolated nucleic acid molecule comprising a nucleic acid sequence encoding a chimeric fusion protein comprising a secretion signal, a phosphatidylserine (PS) binding domain, a linker, and an immunostimulatory domain, and one or more pharmaceutically acceptable carriers.

[0244] Disclosed herein is a pharmaceutical formulation comprising an isolated nucleic acid molecule comprising a nucleic acid sequence encoding a chimeric fusion protein comprising a secretion signal and a phosphatidylserine (PS) binding domain operably linked to an immunostimulatory domain, wherein the immunostimulatory domain further comprise a conjugated small molecule, and one or more pharmaceutically acceptable carriers.

[0245] Disclosed herein is a pharmaceutical formulation comprising an isolated nucleic acid molecule comprising a nucleic acid sequence encoding a chimeric fusion protein comprising a PS-binding domain operably linked to an IgG1 Fc domain, and one or more pharmaceutically acceptable carriers. Disclosed herein is a pharmaceutical formulation comprising an isolated nucleic acid molecule comprising a nucleic acid sequence encoding a chimeric fusion protein comprising a PS-binding domain operably linked to an IgG1 Fc domain and an additional immunostimulatory domain, and one or more pharmaceutically acceptable carriers. Disclosed herein is a pharmaceutical formulation comprising an isolated nucleic acid molecule comprising a nucleic acid sequence encoding a chimeric fusion protein comprising a PS-binding domain operably linked to an IgG1 Fc domain and an additional immunostimulatory domain, wherein the additional immunostimulatory domain comprises the IgV domain of SIRPα or the extracellular domain of NKG2D protein, and one or more pharmaceutically acceptable carriers.

[0246] Disclosed herein is a pharmaceutical formulation comprising an isolated nucleic acid molecule comprising a nucleic acid sequence encoding a chimeric fusion protein comprising a PS-binding domain operably linked to a single-chain antibody (scFV) to a human CD3 protein, and one or more pharmaceutically acceptable carriers. Disclosed herein is a pharmaceutical formulation comprising an isolated nucleic acid molecule comprising a nucleic acid sequence encoding a chimeric fusion protein comprising an Annexin-binding domain operably linked to a single-chain antibody (scFV) to a human CD3 protein, and one or more pharmaceutically acceptable carriers. Disclosed herein is a pharmaceutical formulation comprising an isolated nucleic acid molecule comprising a nucleic acid sequence encoding a single-chain antibody (scFV) to a human CD3 protein and one or more additional immunostimulatory domains, and one or more pharmaceutically acceptable carriers. Disclosed herein is an isolated nucleic acid molecule comprising a nucleic acid sequence encoding a chimeric fusion protein comprising an Annexin-binding domain operably linked to a single-chain antibody (scFV) to a human CD3 protein and one or more additional immunostimulatory domains, and one or more pharmaceutically acceptable carriers.

[0247] Disclosed herein is a pharmaceutical formulation comprising an isolated nucleic acid molecule comprising a nucleic acid sequence encoding a chimeric fusion protein comprising the sequence set forth in SEQ ID NO:85, SEQ ID NO:86, SEQ ID NO:87, SEQ ID NO:88, SEQ ID NO:89, SEQ ID NO:90, SEQ ID NO:91, SEQ ID NO:92, SEQ ID NO:93, SEQ ID NO:94, SEQ ID NO:95, SEQ ID NO:96, SEQ ID NO:97, SEQ ID NO:99, SEQ ID NO:100, SEQ ID NO:101, SEQ ID NO:106, or a fragment thereof, and one or more pharmaceutically acceptable carriers.

[0248] Disclosed herein is a pharmaceutical formulation comprising a vector comprising a disclosed isolated nucleic acid molecule, and one or more pharmaceutically acceptable carriers. Disclosed herein is a pharmaceutical formulation comprising a vector comprising an isolated nucleic acid molecule comprising a nucleic acid sequence encoding one or more disclosed chimeric fusion proteins, and one or more pharmaceutically acceptable carriers. Disclosed herein is a pharmaceutical formulation comprising a vector comprising an isolated nucleic acid molecule comprising a nucleic acid sequence encoding a chimeric fusion protein comprising a phosphatidylserine (PS) binding domain, and one or more pharmaceutically acceptable carriers.

[0249] Disclosed herein is a pharmaceutical formulation comprising a vector comprising an isolated nucleic acid molecule comprising a nucleic acid sequence encoding a chimeric fusion protein comprising a phosphatidylserine (PS) binding domain and an immunostimulatory domain, and one or more pharmaceutically acceptable carriers.

[0250] Disclosed herein is a pharmaceutical formulation comprising a vector comprising an isolated nucleic acid molecule comprising a nucleic acid sequence encoding a chimeric fusion protein comprising a phosphatidylserine (PS) binding domain operably linked an immunostimulatory domain, and one or more pharmaceutically acceptable carriers.

[0251] Disclosed herein is a pharmaceutical formulation comprising a vector comprising an isolated nucleic acid molecule comprising a nucleic acid sequence encoding a phosphatidylserine (PS) binding domain, a linker, and an immunostimulatory domain, and one or more pharmaceutically acceptable carriers. Disclosed herein is a pharmaceutical formulation comprising a vector comprising an isolated nucleic acid molecule comprising a nucleic acid sequence encoding a chimeric fusion protein comprising a phosphatidylserine (PS) binding domain operably linked to an immunostimulatory domain, wherein the immunostimulatory domain further comprise a conjugated small molecule, and one or more pharmaceutically acceptable carriers.

[0252] Disclosed herein is a pharmaceutical formulation comprising a vector comprising an isolated nucleic acid molecule comprising a nucleic acid sequence encoding a chimeric fusion protein comprising a secretion signal and a phosphatidylserine (PS) binding domain, and one or more pharmaceutically acceptable carriers. Disclosed herein is a pharmaceutical formulation comprising a vector comprising an isolated nucleic acid molecule comprising a nucleic acid sequence encoding a chimeric fusion protein comprising a secretion signal, a phosphatidylserine (PS) binding domain, and an immunostimulatory domain, and one or more pharmaceutically acceptable carriers.

[0253] Disclosed herein is a pharmaceutical formulation comprising a vector comprising an isolated nucleic acid molecule comprising a nucleic acid sequence encoding a chimeric fusion protein comprising a secretion signal and a phosphatidylserine (PS) binding domain operably linked an immunostimulatory domain, and one or more pharmaceutically acceptable carriers. Disclosed herein is a pharmaceutical formulation comprising a vector comprising an isolated nucleic acid molecule comprising a nucleic acid sequence encoding a chimeric fusion protein comprising a secretion signal, a phosphatidylserine (PS) binding domain, a linker, and an immunostimulatory domain, and one or more pharmaceutically acceptable carriers.

[0254] Disclosed herein is a pharmaceutical formulation comprising a vector comprising an isolated nucleic acid molecule comprising a nucleic acid sequence encoding a chimeric fusion protein comprising a secretion signal and a phosphatidylserine (PS) binding domain operably linked to an immunostimulatory domain, wherein the immunostimulatory domain further comprise a conjugated small molecule, and one or more pharmaceutically acceptable carriers.

[0255] Disclosed herein is a pharmaceutical formulation comprising a vector comprising an isolated nucleic acid molecule comprising a nucleic acid sequence encoding a chimeric fusion protein comprising a PS-binding domain operably linked to an IgG1 Fc domain, and one or more pharmaceutically acceptable carriers. Disclosed herein is a pharmaceutical formulation comprising a vector comprising an isolated nucleic acid molecule comprising a nucleic acid sequence encoding a chimeric fusion protein comprising a PS-binding domain operably linked to an IgG1 Fc domain and an additional immunostimulatory domain, and one or more pharmaceutically acceptable carriers. Disclosed herein is a pharmaceutical formulation comprising a vector comprising an isolated nucleic acid molecule comprising a nucleic acid sequence encoding a chimeric fusion protein comprising a PS-binding domain operably linked to an IgG1 Fc domain and an additional immunostimulatory domain, wherein the additional immunostimulatory domain comprises the IgV domain of SIRPα or the extracellular domain of NKG2D protein, and one or more pharmaceutically acceptable carriers.

[0256] Disclosed herein is a pharmaceutical formulation comprising a vector comprising an isolated nucleic acid molecule comprising a nucleic acid sequence encoding a chimeric fusion protein comprising a PS-binding domain operably linked to a single-chain antibody (scFV) to a human CD3 protein, and one or more pharmaceutically acceptable carriers. Disclosed herein is a pharmaceutical formulation comprising a vector comprising an isolated nucleic acid molecule comprising a nucleic acid sequence encoding a chimeric fusion protein comprising an Annexin-binding domain operably linked to a single-chain antibody (scFV) to a human CD3 protein, and one or more pharmaceutically acceptable carriers. Disclosed herein is a pharmaceutical formulation comprising a vector comprising an isolated nucleic acid molecule comprising a nucleic acid sequence encoding a single-chain antibody (scFV) to a human CD3 protein and one or more additional immunostimulatory domains, and one or more pharmaceutically acceptable carriers. Disclosed herein is a pharmaceutical formulation comprising a vector comprising an isolated nucleic acid molecule comprising a nucleic acid sequence encoding a chimeric fusion protein comprising an Annexin-binding domain operably linked to a single-chain antibody (scFV) to a human CD3 protein and one or more additional immunostimulatory domains, and one or more pharmaceutically acceptable carriers.

[0257] Disclosed herein is a pharmaceutical formulation comprising a vector comprising an isolated nucleic acid molecule comprising a nucleic acid sequence encoding a chimeric fusion protein comprising the sequence set forth in SEQ ID NO:85, SEQ ID NO:86, SEQ ID NO:87, SEQ ID NO:88, SEQ ID NO:89, SEQ ID NO:90, SEQ ID NO:91, SEQ ID NO:92, SEQ ID NO:93, SEQ ID NO:94, SEQ ID NO:95, SEQ ID NO:96, SEQ ID NO:97, SEQ ID NO:99, SEQ ID NO:100, SEQ ID NO:101, SEQ ID NO:106, or a fragment thereof, and one or more pharmaceutically acceptable carriers.

[0258] Disclosed herein is a pharmaceutical formulation comprising a vector comprising an isolated nucleic acid molecule comprising a nucleic acid sequence encoding a disclosed bispecific chimeric fusion protein as set forth in FIG. 5A-FIG. 5H, and one or more pharmaceutically acceptable carriers. Disclosed herein is a pharmaceutical formulation comprising a vector comprising an isolated nucleic acid molecule comprising a nucleic acid sequence encoding a disclosed bispecific chimeric fusion protein as set forth in FIG. 5A-FIG. 5H, wherein the PS-binding domain comprises any disclosed PS-binding domain and wherein the anti-CD3 binding domain comprises any disclosed binding domain, and one or more pharmaceutically acceptable carriers.

[0259] In an aspect, a disclosed pharmaceutical formulation can comprise (i) one or more active agents, (ii) biologically active agents, (iii) one or more pharmaceutically active agents, (iv) one or more immune-based therapeutic agents, (v) one or more clinically approved agents, or (vi) a combination thereof.

[0260] In an aspect, a disclosed pharmaceutical formulation can further comprise one or more anti-inflammatory agents. Anti-inflammatory agents or drugs include, but are not limited to, steroids and glucocorticoids (including betamethasone, budesonide, dexamethasone, hydrocortisone acetate, hydrocortisone, hydrocortisone, methylprednisolone, prednisolone, prednisone, triamcinolone), nonsteroidal anti-inflammatory drugs (NSAIDS) including aspirin, ibuprofen, naproxen, methotrexate, sulfasalazine, leflunomide, anti-TNF medications, cyclophosphamide and mycophenolate.

[0261] In an aspect, NSAIDs can comprise ibuprofen, naproxen, naproxen sodium, Cox-2 inhibitors such as rofecoxib and celecoxib, sialylates, or any combination thereof. In an aspect, analgesics can comprise acetaminophen, oxycodone, tramadol, proporxyphene hydrochloride, or any combination thereof. In an aspect, glucocorticoids can comprise cortisone, dexamethasone, hydrocortisone, methylprednisolone, prednisolone, prednisone, or any combination thereof. Exemplary biological response modifiers include molecules directed against cell surface markers (e.g., CD4, CD5, etc.), cytokine inhibitors, such as the TNF antagonists (e.g., etanercept, adalimumab, and infliximab, chemokine inhibitors and adhesion molecule inhibitors. In an aspect, biological response modifiers can comprise monoclonal antibodies as well as recombinant forms of molecules. In an aspect, exemplary disease-modifying anti-rheumatic drugs (DMARDs) can comprise include azathioprine, cyclophosphamide, cyclosporine, methotrexate, penicillamine, leflunomide, sulfasalazine, hydroxychloroquine, Gold (oral (auranofin) and intramuscular), minocycline, or any combination thereof.

[0262] In an aspect, a disclosed chemotherapeutic agent in a disclosed pharmaceutical formulation can comprise an anthracycline, a vinca alkaloid, an alkylating agent, an immune cell antibody, an antimetabolite, a TNFR glucocorticoid induced TNFR related protein (GITR) agonist, a proteasome inhibitor, an immunomodulator, or any combination thereof. In an aspect, a disclosed chemotherapeutic agent can comprise 5-fluorouracil (Adrucil, Efudex), 6-mercaptopurine (Purinethol), 6-thioguanine, aclarubicin or aclacinomycin A, alemtuzamab (Lemtrada), anastrozole (Arimidex), bicalutamide (Casodex), bleomycin sulfate (Blenoxane), bortezomib (Velcade), busulfan (Myleran), busulfan injection (Busulfex), capecitabine (Xeloda), carboplatin (Paraplatin), carmustine (BiCNU), chlorambucil (Leukeran), cisplatin (Platinol), cladribine (Leustatin), Cosmegan, cyclophosphamide (Cytoxan or Neosar), cyclophosphamide, cytarabine liposome injection (DepoCyt), cytarabine, cytosine arabinoside (Cytosar-U), dacarbazine (DTIC-Dome), dactinomycin (Cosmegen), daunorubicin citrate liposome injection (DaunoXome), daunorubicin hydrochloride (Cerubidine), dexamethasone, docetaxel (Taxotere), doxorubicin hydrochloride (Adriamycin, Rubex), etoposide (Vepesid), fludarabine phosphate (Fludara), flutamide (Eulexin), folic acid antagonists, gemcitabine (difluorodeoxycitidine), gemtuzumab, gliotoxin, hydroxyurea (Hydrea), Idarubicin (Idamycin), ifosfamide (IFEX), ifosfamide, irinotecan (Camptosar), L-asparaginase (ELSPAR), lenalidomide), leucovorin calcium, melphalan (Alkeran), melphalan, methotrexate (Folex), mitoxantrone (Novantrone), mylotarg, N4-pentoxycarbonyl-5 deoxy-5-fluorocytidine, nab-paclitaxel (Abraxane), paclitaxel (Taxol), pentostatin, phoenix (Yttrium90/MX-DTPA), polifeprosan 20 with carmustine implant (Gliadel), purine analogs and adenosine deaminase inhibitors (fludarabine), pyrimidine analogs, rituximab, tamoxifen citrate (Nolvadex), temozolomide), teniposide (Vumon), tezacitibine, thalidomide or a thalidomide derivative, thiotepa, tirapazamine (Tirazone), topotecan hydrochloride for injection (Hycamptin), tositumomab), vinblastine (Velban), vinblastine, vincristine (Oncovin), vindesine, vinorelbine (Navelbine), or any combination thereof.

[0263] In an aspect, a disclosed pharmaceutical formulation can comprise an anti-chemokine therapy that enhances the resident memory T cell formations in tumor-free tissues. In an aspect, a disclosed anti-chemokine therapy can comprise one or more antibodies against CCL1, CCL2, CCL4, CCL17, CCL19, CCL21, CCL22, CCL25, CXCL9, CXCL10, CXCL11, CXCL12, CXCL13, CCR2, CCR5, CCR7, CCR8, CCR9, CXCR3, CXCR4, CXCR5, CX3CL1, CX3CR1, or any combination thereof.

[0264] In an aspect, a disclosed pharmaceutical formulation can further comprise abagovomab, adecatumumab, afutuzumab, alemtuzumab, altumomab, amatuximab, anatumomab, arcitumomabm bavituximab, bectumomab, bevacizumab, bivatuzumab, blinatumomab, brentuximab, cantuzumab, catumaxomab, cetuximab, citatuzumab, cixutumumab, clivatuzumab, conatumumab, daratumumab, drozitumab, duligotumab, dusigitumab, detumomab, dacetuzumab, dalotuzumab, ecromeximab, elotuzumab, ensituximab, ertumaxomab, etaracizumab, farietuzumab, ficlatuzumab, figitumumab, flanvotumab, futuximab, ganitumab, gemtuzumab, girentuximab, glembatumumab, ibritumomab, igovomab, imgatuzumab, indatuximab, inotuzumab, intetumumab, ipilimumab, iratumumab, labetuzumab, lexatumumab, lintuzumab, lorvotuzumab, lucatumumab, mapatumumab, matuzumab, milatuzumab, minretumomab, mitumomab, moxetumomab, namatumab, naptumomab, necitumumab, nimotuzumab, nofetumomab, ocaratuzumab, ofatumumab, olaratumab, onartuzumab, oportuzumab, oregovomab, panitumumab, parsatuzumab, patritumab, pemtumomab, pertuzumab, pintumomab, pritumumab, racotumomab, radretumab, rilotumumab, rituximab, robatumumab, satumomab, sibrotuzumab, siltuximab, simtuzumab, solitomab, tacatuzumab, taplitumomab, tenatumomab, teprotumumab, tigatuzumab, tositumomab, trastuzumab, tucotuzumab, ublituximab, veltuzumab, vorsetuzumab, votumumab, zalutumumab, CC49, 3F8, or any combination thereof.

[0265] In an aspect, a disclosed pharmaceutical formulation can stimulate an effector cell mediated immune response to PS-expressing tumor cells. In an aspect, a disclosed pharmaceutical formulation can restore one or more aspects of cellular homeostasis and/or cellular functionality and/or metabolic dysregulation in a subject having cancer. In an aspect, metabolic dysregulation can be associated with cancer or cancerous cells. In an aspect, following administration of a disclosed pharmaceutical formulation, cell death of PS-expressing cancer cells can be effected.

[0266] In an aspect, a disclosed pharmaceutical formulation can be prepared for systemic or direct administration. In an aspect, a disclosed pharmaceutical formulation can be prepared for oral administration, intravenous administration, intratumoral administration, intraperitoneal administration, or any combination thereof. In an aspect, a disclosed pharmaceutical formulation can be prepared for any method of administration disclosed herein. In an aspect, a disclosed pharmaceutical formulation can be prepared for administration via multiple routes either concurrently or sequentially. For example, in an aspect, a disclosed pharmaceutical formulation can be first administered intratumorally and then be administered intravenously. In an aspect, a disclosed pharmaceutical formulation can be first administered intratumorally and then be administered orally. A skilled clinical can determine the best route of administration for a subject at a given time.

[0267] In an aspect, a disclosed pharmaceutical formulation can comprise one or more immune modulators. In an aspect, a disclosed pharmaceutical formulation can comprise one or more proteasome inhibitors. In an aspect, a disclosed pharmaceutical formulation can comprise one or more immunosuppressives or immunosuppressive agents. In an aspect, an immunosuppressive agent can be anti-thymocyte globulin (ATG), cyclosporine (CSP), mycophenolate mofetil (MMF), or a combination thereof. In an aspect, a disclosed pharmaceutical formulation can comprise an anaplerotic agent (such as, for example, C7 compounds like triheptanoin or MCT).

[0268] In an aspect, a disclosed pharmaceutical formulation can comprise an RNA therapeutic. An RNA therapeutic can comprise RNA-mediated interference (RNAi) and/or antisense oligonucleotides (ASO). In an aspect, a disclosed RNA therapeutic can be directed at any protein or enzyme that is overexpressed or is overactive due to a missing, deficient, and/or mutant protein or enzyme (such as, for example, a missing, deficient, and/or mutant protein or enzyme related to cancer and/or associated with cancerous cells). In an aspect, a disclosed RNA therapeutic can be directed at any protein or enzyme that is overexpressed or is overactive and related to cancer and/or associated with cancerous cells.

[0269] In an aspect, a disclosed therapeutically effective amount or effective dose of a disclosed chimeric fusion protein or pharmaceutical formulation thereof can be about 0.01 μg/kg to about 10 mg/kg per subject.

[0270] In an aspect, a disclosed pharmaceutically acceptable carrier can comprise any disclosed carrier. In an aspect, a disclosed pharmaceutically acceptable carrier can comprise any disclosed excipient.

[0271] In an aspect, a disclosed pharmaceutical formulation can stimulate an effector cell mediated immune modulator response to PS-expressing tumor cells. In an aspect, a disclosed pharmaceutical formulation can induce a tumor reducing immune response. In an aspect, a disclosed pharmaceutical formulation can induce phagocytosis of cancer cells in the subject. In an aspect, a disclosed pharmaceutical formulation can cross-prime an anti-tumor T cell response. In an aspect a disclosed pharmaceutical formulation can induce a tumor eliminating immune response. In an aspect, a disclosed pharmaceutical formulation can treat cancer.

[0272] In an aspect, a disclosed pharmaceutical formulation can induce cell death in the targeted cell. In an aspect, a disclosed pharmaceutical formulation can stimulate an effector cell mediated immune modulator response to PS-expressing tumor cells. In an aspect, a disclosed pharmaceutical formulation can induce a tumor reducing immune response. In an aspect, a disclosed pharmaceutical formulation can induce phagocytosis of cancer cells in the subject. In an aspect, a disclosed pharmaceutical formulation can cross-prime an anti-tumor T cell response. In an aspect, a disclosed pharmaceutical formulation can induce a tumor eliminating immune response. In an aspect, a disclosed pharmaceutical formulation can treat cancer. In an aspect, a disclosed pharmaceutical formulation can improve and/or extend the survivability of the subject, can improve a subject's quality of life, can increase and/or prolong a subject's life span, or any combination thereof.

### 8. Animals

[0273] Disclosed herein are animals used to validate the efficacy and/or safety of one or more disclosed chimeric fusion proteins, one or more disclosed antibody drug conjugates, one or more disclosed isolated nucleic acid molecules, one or more disclosed vectors, one or more disclosed pharmaceutical formulations, or any combination thereof. In an aspect, a disclosed animal can be treated with one or more disclosed chimeric fusion proteins, one or more disclosed antibody drug conjugates, one or more disclosed isolated nucleic acid molecules, one or more disclosed vectors, one or more disclosed pharmaceutical formulations, or any combination thereof. In an aspect, animals can be assessed and/or monitored for one or more biological and/or chemical functions prior to treatment, during treatment, after treatment, or any combination thereof, wherein treatment comprises administering one or more disclosed chimeric fusion proteins, one or more disclosed antibody drug conjugates, one or more disclosed isolated nucleic acid molecules, one or more disclosed vectors, one or more disclosed pharmaceutical formulations, or any combination thereof. In an aspect, a disclosed treated subject can be a mouse or a rat. In an aspect, a disclosed treated subject can be a transgenic mouse or a transgenic rat. In an aspect, a disclosed treated subject can have one or more types of cancers and/or tumors (such as, for example, hematological cancer).

### E. Methods of Treating a Hematological Cancer

[0274] Disclosed herein is a method of treating a hematological cancer, the method comprising treating a subject in need thereof by administering to the subject in need thereof a therapeutically effective amount of a disclosed chimeric fusion protein or a pharmaceutical formulation thereof. Disclosed herein is a method of treating a hematological cancer, the method comprising treating a subject in need thereof by administering to the subject in need thereof a therapeutically effective amount of a disclosed chimeric fusion protein or a pharmaceutical formulation thereof. Disclosed herein is a method of treating a hematological cancer, the method comprising treating a subject in need thereof by administering to the subject in need thereof a therapeutically effective amount of a disclosed chimeric fusion protein targeting phosphatidylserine (PS) or a pharmaceutical formulation thereof.

[0275] Disclosed herein is a method of treating a hematological cancer, the method comprising treating a subject in need thereof by administering to the subject in need thereof a therapeutically effective amount of a disclosed chimeric fusion protein targeting phosphatidylserine-expressing tumor cells or a pharmaceutical formulation thereof. In an aspect, wherein the disclosed chimeric fusion protein targets phosphatidylserine (PS)-expressing cancer cells. In an aspect, wherein the disclosed chimeric fusion protein targets phosphatidylserine (PS)-expressing hematological cancer cells. In an aspect, disclosed PS-expressing cancer cells can be lymphoma cells, leukemia cells, and multiple myeloma cells. In an aspect, disclosed PS-expressing cancer cells can be acute myeloid leukemia (AML) or myelodysplastic syndrome. In an aspect, disclosed PS-expressing cancer cells can be blood borne.

[0276] In an aspect, a subject can be treatment-naïve. In an aspect, a subject has received one or more treatments prior to the administering of a disclosed chimeric fusion protein or pharmaceutical formulation thereof. In an aspect, one or more treatments can comprise one or more anti-cancer therapies and/or treatments.

[0277] In an aspect, a subject can have, be diagnosed with, or be suspected of having one or more cancers. In an aspect, a disclosed method of treating a hematological cancer can further comprise diagnosing the subject as have cancer or cancerous cells. In an aspect, a disclosed method of treating a hematological cancer can further comprise diagnosing the subject as having a hematological cancer or cancerous hematological cells. In an aspect, a disclosed hematological cancer can comprise lymphoma, myeloma, leukemia, or any combination thereof.

[0278] In an aspect, a subject can have, be diagnosed with, or be suspected of having one or more cancers. In an aspect, a subject can have, be diagnosed with, or be suspected of having a hematological cancer and one or more other cancers. In an aspect, other cancers can comprise ovarian cancer, ovarian adenocarcinoma, ovarian teratocarcinoma, lung cancer, small cell lung cancer (SCLC), non-small cell lung cancer (NSCLC), squamous cell lung carcinoma, adenocarcinoma, gastric cancer, breast cancer, hepatic cancer, pancreatic cancer, skin cancer, in particular basal cell carcinoma and squamous cell carcinoma, malignant melanoma, head and neck cancer, malignant pleomorphic adenoma, sarcoma, synovial sarcoma, carcinosarcoma, bile duct cancer, bladder cancer, transitional cell carcinoma, papillary carcinoma, kidney cancer, renal cell carcinoma, clear cell renal cell carcinoma, papillary renal cell carcinoma, colon cancer, small bowel cancer, small bowel adenocarcinoma, adenocarcinoma of the ileum, testicular embryonal carcinoma, placental choriocarcinoma, cervical cancer, testicular cancer, testicular seminoma, testicular teratoma, embryonic testicular cancer, uterine cancer, teratocarcinoma, embryonal carcinoma, or any combination thereof.

[0279] In an aspect, a disclosed method of treating a hematological cancer can further comprise collecting one or more blood and/or biological samples from a subject at the same time or at different times. For example, in an aspect, a blood sample and/or a biological sample can be collected from a subject at a pre-determined interval. In an aspect, a pre-determined interval can be once a week, once every 2 weeks, once every 3 weeks, once every 4 weeks, once every 5 weeks, once every 6 weeks, once every 7 weeks, once every 8 weeks, or at a longer interval. In an aspect, a pre-determined interval can be once a month, once every 2 months, once every 3 months, once every 5 months, once every 5 months, once every 6 months, or at a longer interval. In an aspect, a blood sample and/or a biological sample can be collected from a subject prior to treatment, during treatment, after treatment, or any combination thereof. In an aspect, a blood and/or a biological sample can be collected from a subject at any time deemed medically and/or clinically appropriate by the skilled clinician.

[0280] In an aspect, a therapeutically effective amount or effective dose or effective amount or therapeutically effective dosage of a disclosed chimeric fusion protein or pharmaceutical formulation thereof can be any amount that, when used alone or in combination with another therapeutic agent, can attack and destroy PS-expressing tumor cells. In an aspect, a therapeutically effective amount or effective dose or effective amount or therapeutically effective dosage of a disclosed chimeric fusion protein or pharmaceutical formulation thereof can be any amount that, when used alone or in combination with another therapeutic agent, can attack and destroy PS-expressing tumor cells. In an aspect, a therapeutically effective amount or effective dose or effective amount or therapeutically effective dosage of a disclosed chimeric fusion protein or pharmaceutical formulation thereof can be any amount that can enhance the success rate of one or more conventional cytotoxic cancer therapies against PS-expressing tumor cells.

[0281] In an aspect, a disclosed therapeutically effective amount or effective dose of a disclosed chimeric fusion protein or pharmaceutical formulation thereof can be about 0.01 μg/kg to about 10 mg/kg per subject.

[0282] In an aspect, a therapeutically effective amount or effective dose or effective amount or therapeutically effective dosage of a disclosed chimeric fusion protein or pharmaceutical formulation thereof can protect a subject against the onset of a disease and/or promotes disease regression evidenced by a decrease in severity of disease symptoms, an increase in frequency and duration of disease symptom-free periods, or a prevention of impairment or disability due to the disease affliction. The ability of a therapeutic agent to promote disease regression can be evaluated using a variety of methods known to the skilled practitioner, such as in human subjects during clinical trials, in animal model systems predictive of efficacy in humans, or by assaying the activity of the agent in in vitro assays.

[0283] In an aspect, administering a disclosed chimeric fusion protein or pharmaceutical formulation thereof can comprise systemic or direct administration. In an aspect, administering can comprise oral administration, intravenous administration, intratumoral administration, intraperitoneal administration, intracranial administration, subcutaneous administration, intradermal administration, intrathecal administration, or any combination thereof. In an aspect, administering a disclosed chimeric fusion protein or pharmaceutical formulation thereof can be administered by any method of administration disclosed herein. In an aspect, a disclosed chimeric fusion protein or pharmaceutical formulation thereof can be administered via multiple routes either concurrently or sequentially.

[0284] For example, in an aspect, a disclosed chimeric fusion protein or pharmaceutical formulation thereof can be first administered intratumorally and then be administered intravenously. In an aspect, a disclosed chimeric fusion protein or pharmaceutical formulation thereof can be first administered intratumorally and then be administered orally. A skilled clinician can determine the best route of administration for a subject at a given time.

[0285] In an aspect, a disclosed method can comprise repeating the administering of a disclosed chimeric fusion protein or pharmaceutical formulation thereof.

[0286] In an aspect, a disclosed method of treating a hematological cancer can comprise protecting the subject from metastasis. In an aspect, a disclosed method of treating a hematological cancer can comprise reducing the risk of developing metastasis. In an aspect, a disclosed method of treating a hematological cancer can comprise preventing or inhibiting metastasis.

[0287] In an aspect, a disclosed method can comprise monitoring the subject for adverse effects. In an aspect, in the absence of adverse effects, a disclosed method can comprise continuing to treat the subject. In an aspect, continuing to treat the subject can comprise continuing to administer to the subject a disclosed chimeric fusion protein or pharmaceutical formulation thereof. In an aspect, in the presence of adverse effects, a disclosed method can comprise modifying one or more steps of the method. In an aspect, modifying one or more steps of a disclosed method can comprise modifying the administering step. In an aspect, modifying the administering step can comprise changing the amount of a disclosed chimeric fusion protein or pharmaceutical formulation thereof administered to the subject, changing the frequency of administration of a disclosed chimeric fusion protein or pharmaceutical formulation thereof, changing the duration of administration of a disclosed chimeric fusion protein or pharmaceutical formulation thereof, changing the route of administration of a disclosed chimeric fusion protein or pharmaceutical formulation thereof, or any combination thereof.

[0288] In an aspect, a disclosed method of treating a hematological cancer can further comprise administering to the subject an immune checkpoint inhibitor (e.g., an anti-PD1 molecule). In an aspect, a disclosed anti-PD1 molecule can comprise an anti-PD1 antibody, an anti-PDL1 antibody, or any combination thereof. In an aspect, a disclosed anti-PD1 antibody can comprise a monoclonal antibody, a humanized monoclonal antibody, or a fragment thereof. In an aspect, a disclosed anti-PD1 antibody can comprise a polyclonal antibody, a humanized polyclonal antibody, or a fragment thereof. In an aspect, a disclosed anti-PD1 antibody can comprise any antibody or antibody fragment that specifically recognizes PD1. In an aspect, a disclosed anti-PDL1 antibody can comprise a monoclonal antibody, a humanized monoclonal antibody, or a fragment thereof. In an aspect, a disclosed anti-PDL1 antibody can comprise a polyclonal antibody, a humanized polyclonal antibody, or a fragment thereof. In an aspect, a disclosed anti-PDL1 antibody can comprise any antibody or antibody fragment that specifically recognizes PDL1. Antibodies and methods of preparing antibodies are known in the art. Similarly, recombinant antibodies and methods of preparing recombinant antibodies are known in the art.

[0289] In an aspect, a disclosed method of treating a hematological cancer can further comprise repeating the administering of the anti-PD1 molecule. In an aspect, a disclosed anti-PD1 molecule can be administered prior to, concurrent with, or after the administration of the interfering molecule. In an aspect of a disclosed method of treating a hematological cancer administering a disclosed anti-PD1 molecule can comprise systemic or direct administration. In an aspect, administering a disclosed anti-PD1 molecule can comprise intravenous administration, intratumoral administration, intraperitoneal administration, or any combination thereof. In an aspect, administering a disclosed can be administered by any method of administration disclosed herein. In an aspect, a disclosed anti-PD1 molecule can be administered via multiple routes either concurrently or sequentially. For example, in an aspect, a disclosed anti-PD1 molecule can be first administered intratumorally and then be administered intravenously. In an aspect, administering a disclosed anti-PD1 molecule can be first administered intratumorally and then be administered orally. A skilled clinician can determine the best route of administration for a subject at a given time.

[0290] For example, in an aspect, a disclosed anti-PD1 molecule can be administered about 3 months, about 2 months, or about 1 month prior to the administering of a disclosed chimeric fusion protein or pharmaceutical formulation thereof. In an aspect, a disclosed anti-PD1 molecule can be administered about 8 weeks, about 7 weeks, about 6 weeks, about 5 weeks, about 4 weeks, about 3 weeks, about 2 weeks, or about 1 week prior to the administering of a disclosed chimeric fusion protein or pharmaceutical formulation thereof. In an aspect, a disclosed anti-PD1 molecule can be administered about 30, 29, 28, 27, 26, 25, 24, 23, 22, 21, 20, 19, 18, 17, 16, 15, 14, 13, 12, 11, 10, 9, 8, 7, 6, 5, 4, 3, 2 or 1 day prior to the administering of a disclosed chimeric fusion protein or pharmaceutical formulation thereof. In an aspect, a disclosed anti-PD1 molecule can be administered about 24, 23, 22, 21, 20, 19, 18, 17, 16, 15, 14, 13, 12, 11, 10, 9, 8, 7, 6, 5, 4, 3, 2, or 1 hours prior to the administering of a disclosed chimeric fusion protein or pharmaceutical formulation thereof.

[0291] In an aspect, a disclosed method of treating a hematological cancer can further comprise repeating the administering of a disclosed anti-PD1 molecule. In an aspect, a disclosed anti-PD1 molecule can be administered prior to, concurrent with, or after the administration of the disclosed chimeric fusion protein.

[0292] In an aspect, a disclosed method of treating a hematological cancer can comprise administering to the subject one or more additional anti-cancer therapies. Anti-cancer therapies are known to the art. In an aspect, a disclosed anti-cancer therapy can comprise endocrine therapy, radiotherapy, hormone therapy, gene therapy, thermal therapy, ultrasound therapy, or any combination thereof. In an aspect, a disclosed anti-cancer therapy can comprise one or more chemotherapeutic agents. In an aspect, a disclosed chemotherapeutic agent can comprise an anthracycline, a vinca alkaloid, an alkylating agent, an immune cell antibody, an antimetabolite, a TNFR glucocorticoid induced TNFR related protein (GITR) agonist, a proteasome inhibitor, an immunomodulator, or any combination thereof. In an aspect, a disclosed chemotherapeutic agent can comprise 5-fluorouracil (Adrucil, Efudex), 6-mercaptopurine (Purinethol), 6-thioguanine, aclarubicin or aclacinomycin A, alemtuzamab (Lemtrada), anastrozole (Arimidex), axitinib (Inlyta), bevacizumab (Avastin), bicalutamide (Casodex), bleomycin sulfate (Blenoxane), bortezomib (Velcade), busulfan (Myleran), busulfan injection (Busulfex), capecitabine (Xeloda), carboplatin (Paraplatin), carmustine (BiCNU), chlorambucil (Leukeran), cisplatin (Platinol), cladribine (Leustatin), Cosmegan, cyclophosphamide (Cytoxan or Neosar), cyclophosphamide, cytarabine liposome injection (DepoCyt), cytarabine, cytosine arabinoside (Cytosar-U), dacarbazine (DTIC-Dome), dactinomycin (Cosmegen), daunorubicin citrate liposome injection (DaunoXome), daunorubicin hydrochloride (Cerubidine), dexamethasone, docetaxel (Taxotere), doxorubicin hydrochloride (Adriamycin, Rubex), etoposide (Vepesid), fludarabine phosphate (Fludara), flutamide (Eulexin), folic acid antagonists, gemcitabine (difluorodeoxycitidine), gemtuzumab, gliotoxin, hydroxyurea (Hydrea), Idarubicin (Idamycin), ifosfamide (IFEX), ifosfamide, irinotecan (Camptosar), L-asparaginase (ELSPAR), lenalidomide), leucovorin calcium, melphalan (Alkeran), melphalan, methotrexate (Folex), mitoxantrone (Novantrone), mylotarg, N4-pentoxycarbonyl-5 deoxy-5-fluorocytidine, nab-paclitaxel (Abraxane), paclitaxel (Taxol), pentostatin, phoenix (Yttrium90/MX-DTPA), polifeprosan 20 with carmustine implant (Gliadel), purine analogs and adenosine deaminase inhibitors (fludarabine), pyrimidine analogs, rituximab, tamoxifen citrate (Nolvadex), temozolomide), teniposide (Vumon), tezacitibine, thalidomide or a thalidomide derivative, thiotepa, tirapazamine (Tirazone), topotecan hydrochloride for injection (Hycamptin), tositumomab), vinblastine (Velban), vinblastine, vincristine (Oncovin), vindesine, vinorelbine (Navelbine), or any combination thereof.

[0293] In an aspect, a disclosed method of treating a hematological cancer can further comprise repeating the administering of a disclosed chemotherapeutic agent. In an aspect, a disclosed chemotherapeutic agent can be administered prior to, concurrent with, or after the administration of the disclosed chimeric fusion protein. The table below provides a non-comprehensive listing of treatments of hematologic cancers as known to the art.

| Classification | Mechanism of Action | Examples |
|---|---|---|
| Antitumor antibiotics | Interact directly with DNA in the nucleus of cells, | Bleomycin sulfate (Blenoxane ®) |
| | interfering with cell survival | Daunorubicin (Cerubidine ®) |
| | | Idarubicin (Idamycin ®) |
| | | Doxorubicin (Adriamycin ®) |
| | | Mitoxantrone (Novantrone ®) |
| Antimetabolites | Block cells' ability to form RNA or DNA, preventing | Cladribine (Leustatin ®, 2-CdA) |
| | cell growth and accelerating cell death | Cytarabine (cytosine arabinoside, ARA-C, Cyto-sar-U ®) |
| | | Fludarabine (Fludara ®) |
| | | Hydroxyurea (Hydrea ®, Droxia ®) |
| | | 6-Mercaptopurine (Purinethol ®) |
| | | Methotrexate |
| | | 6-Thioguanine (Thioguanine ®, Tabloid ®) |
| | | Azacitidine (Vidaza ®) |
| | | Decitabine (Dacogen ®) |
| | | Clofarabine (Clolar ®) |
| Immunomodulators | Exact mechanism of action is unclear; immune, | Interferon (Roferon ® A, Intron ® A) |
| | cytotoxic, and antiangiogenic effects | Pegylated interferon (PEG IFN) |
| | | Thalidomide (Thalomid ®) |
| | | Lenalidomide (Revlimid ®) |
| Histone deacetylase | Modulate chromatin structure and gene expression; | Vorinostat (Zolinza ®) |
| inhibitors | induce cell growth arrest, cell differentiation, and death | |
| | of leukemia cells | |
| Corticosteroids | Cytotoxic activity against lymphoma and leukemia cells | Dexamethasone (Decadron ®) |
| | | Methylprednisolone (Medrol ®) |
| | | Prednisone (Deltasone ®) |
| Bisphosphonates | Block the reabsorption of bone in myeloma and have | Pamidronate (Aredia ®) |
| | direct effects on myeloma cells | Zoledronic acid (Zometa ®) |
| Plant alkaloids | Act on certain proteins (enzymes) in the cell nucleus that | Etoposide (VP-16, VePesid ®, Etopophos ®, Toposar ®) |
| | normally repair injury to DNA (DNA-repair enzyme | Teniposide (VM-26, Vumon ®) |
| | inhibitors) | Topotecan (Hycamtin ®) |
| | Impair structures in the cell that are required for cells to | Vinblastine (Velban ®) |
| | divide into two daughter cells (block mitosis) | Vincristine (Oncovin ®) |
| | | Paclitaxel (Taxol ®) |
| Alkylating agents | Act on the breakdown of proteins in the proteasome, a | Bendamustine (Treanda ®) |
| | key cell function; used for multiple myeloma | Busulfan (Myleran ®, Busulfex ®) |
| | | Carboplatin (Paraplatin ®) |
| | | Carmustine (BCNU, BiCNU ®) |
| | | Chlorambucil (Leukeran ®) |
| | | Cisplatin (Platinol ®) |
| | | Cyclophosphamide (Cytoxan ®, Neosar ®) |
| | | Dacarbazine (DTIC-Dome ®) |
| | | Ifosfamide (Ifex ®) |
| | | Lomustine (CCNU ®, CeeNU ®) |
| | | Mechlorethamine (nitrogen mustard, Mustargen ®) |
| | | Melphalan (Alkeran ®) |
| | | Procarbazine (Matulane ®) |
| | | Bortezomib (Velcade ®) |
| Proteasome inhibitors | Act on the breakdown of proteins in the proteasome, a | Bortezomib (Velcade ®) |
| | key cell function; used for multiple myeloma | |
| Monoclonal antibodies | Target specific antigens on cancer cells | Rituximab (Rituxan ®) |
| | | Yttrium-90-ibritumomab tiuxetan (Zevalin ®) |
| | | Tositumomab (Bexxar ®) |
| | | Ofatumumab (Arzerra ®) |
| Tyrosine kinase | Block specific mutant proteins that initiate malignant | Imatinib mesylate (Gleevec ®) |
| inhibitors | cell transformation | Dasatinib (Sprycel ®) |
| | | Nilotinib (Tasigna ®) |
| Cell-maturing agents | Induce maturation of leukemia cells | Tretinoin (all-trans-retinoic acid [ATRA], Vesanoid ®) |
| | | Arsenic trioxide (Trisenox ®) |
| Janus kinase inhibitor | Janus kinase inhibitor (JAK1 and JAK2) | Ruxolitinib (Jakafi ®) |
| Phototherapy | Activated by ultraviolet light to kill skin lymphoma cells | Psoralen |

[0294] In an aspect, a disclosed method of treating a hematological cancer can comprise administering to the subject an anti-chemokine therapy. In an aspect, a disclosed anti-chemokine therapy can comprise one or more antibodies against CCL1, CCL2, CCL4, CCL17, CCL19, CCL21, CCL22, CCL25, CXCL9, CXCL10, CXCL11, CXCL12, CXCL13, CCR2, CCR5, CCR7, CCR8, CCR9, CXCR3, CXCR4, CXCR5, CX3CL1, CX3CR1, or any combination thereof. In an aspect, a disclosed method of treating a hematological cancer can further comprise repeating the administering of a disclosed anti-PD1 molecule. In an aspect, a disclosed anti-chemokine molecule can be administered prior to, concurrent with, or after the administration of the disclosed chimeric fusion protein.

[0295] In an aspect, a disclosed method of treating a hematological cancer can comprise administering an oligonucleotide therapeutic agent. A disclosed oligonucleotide therapeutic agent can comprise a single-stranded or double-stranded DNA, iRNA, shRNA, siRNA, mRNA, non-coding RNA (ncRNA), an antisense molecule, miRNA, a morpholino, a peptide-nucleic acid (PNA), or an analog or conjugate thereof. In an aspect, a disclosed oligonucleotide therapeutic agent can be an ASO or an RNAi. In an aspect, a disclosed oligonucleotide therapeutic agent can comprise one or more modifications at any position applicable. In an aspect, a disclosed oligonucleotide therapeutic agent can comprise a CRISPR-based endonuclease. In an aspect, a disclosed endonuclease can be Cas9. CRISPR/Cas9 systems and methods are known to the art. In an aspect, a disclosed method of treating a hematological cancer can further comprise repeating the administering of a disclosed anti-oligonucleotide therapeutic agent. In an aspect, a disclosed anti-oligonucleotide therapeutic agent can be administered prior to, concurrent with, or after the administration of the disclosed chimeric fusion protein.

[0296] In an aspect, a disclosed method of treating a hematological cancer can further comprise preventing or inhibiting metastasis of cancer cells. In an aspect, a disclosed method can comprise a 10%, 20%, 30%, 40%, 50%, 60%, 70%, 80%, 90%, 100%, or any amount of decrease and/or reduction in the risk of and/or actual metastasis of cancer cells when compared to a control subject (such as, for example, a subject that has not received a disclosed treatment (e.g., a disclosed chimeric fusion protein or a pharmaceutical formulation thereof)). In an aspect, preventing or inhibiting metastasis of cancer cells can comprise a 10-20%, 20-30%, 30-40%, 40-50%, 50-60%, 60-70%, 70-80%, 80-90%, or 90-100% or any amount of decrease and/or reduction in the risk of and/or actual metastasis of cancer cells when compared to a control subject (such as, for example, a subject that has not received a disclosed treatment (e.g., a disclosed chimeric fusion protein or a pharmaceutical formulation thereof).

[0297] In an aspect, a disclosed method of treating a hematological cancer can comprise surgically resecting the tumor and/or cancer cells from the subject. In an aspect, following resecting the tumor and/or cancer cells from the subject, a disclosed method of treating a hematological cancer can comprise continuing to administer to the subject a therapeutically effective amount of a disclosed chimeric fusion protein or a pharmaceutical formulation thereof and continuing to administer to the subject a therapeutically effective amount of an anti-PD1 molecule, a disclosed anti-chemokine therapy, a disclosed chemotherapeutic agent, any disclosed therapeutic agent, or any combination thereof.

[0298] In an aspect, a disclosed method of treating a hematological cancer can further comprise subjecting the subject to one or more invasive or non-invasive diagnostic assessments. Diagnostic assessments are known to the art. In an aspect, a disclosed non-invasive diagnostic assessment can comprise x-rays, computerized tomography (CT) scans, magnetic resonance imaging (MRI) scans, ultrasounds, positron emission tomography (PET) scans, or any combination thereof. In an aspect, a disclosed invasive diagnostic assessment can comprise a tissue biopsy or exploratory surgery.

[0299] In an aspect, a disclosed method of treating a hematological cancer can restore one or more aspects of cellular homeostasis and/or cellular functionality and/or metabolic dysregulation in a subject, such as, for example, a subject having a hematological cancer or cancerous cells. In an aspect, a disclosed chimeric fusion protein or pharmaceutical formulation thereof can restore one or more aspects of cellular homeostasis and/or cellular functionality and/or metabolic dysregulation in a subject having a hematological cancer. In an aspect, metabolic dysregulation can be associated with a hematological cancer or cancerous cells. In an aspect, restoring one or more aspects of cellular homeostasis and/or cellular functionality can comprise one or more of the following: (i) correcting cell starvation in one or more cell types; (ii) normalizing aspects of the autophagy pathway (such as, for example, correcting, preventing, reducing, and/or ameliorating autophagy); (iii) improving, enhancing, restoring, and/or preserving mitochondrial functionality and/or structural integrity; (iv) improving, enhancing, restoring, and/or preserving organelle functionality and/or structural integrity; (v) correcting enzyme dysregulation; (vi) reversing, inhibiting, preventing, stabilizing, and/or slowing the rate of progression of the multi-systemic manifestations of a cancer; (vii) reversing, inhibiting, preventing, stabilizing, and/or slowing the rate of progression of a cancer, or (viii) any combination thereof. In an aspect, restoring one or more aspects of cellular homeostasis can comprise improving, enhancing, restoring, and/or preserving one or more aspects of cellular structural and/or functional integrity. In an aspect, restoration can be a partial or incomplete restoration. In an aspect, restoration can be complete or near complete restoration such that the level of expression, activity, and/or functionality is similar to that of a wild-type or control level. In an aspect, restoring one or more aspects of cellular homeostasis and/or cellular functionality can comprise preventing or inhibiting metastasis of cancer cells in the subject.

[0300] In an aspect of a disclosed method of treating a hematological cancer, techniques to monitor, measure, and/or assess the restoring one or more aspects of cellular homeostasis and/or cellular functionality can comprise qualitative (or subjective) means as well as quantitative (or objective) means. These means are known to the skilled person. For example, representative regulated variables and sensors relating to systemic homeostasis are provided below.

| Regulated Variable | Sensor |
|---|---|
| Blood Pressure/Blood | Aortic Body (Aorta), Carotid Body (Carotid |
| Volume/Na⁺ Conc./ | Artery), Atrial Volume Receptors (Heart), |
| | Juxtaglomerular Apparatus (Kidney) |
| Ca²⁺/Mg²⁺/PO₄³⁻ Conc. | Chief Cells (Parathyroid Gland) |
| Glucose | Islet of Langerhans (Pancreas) |
| Osmolarity | Circumventricular Organs (Hypothalamus) |
| pO₂, pCO₂, and pH | Aortic Body (Aorta), Carotid Body (Carotid |
| | Artery), Ventrolateral Medulla (Medulla) |
| Temperature | Thermosensory neurons (Skin), Preoptic Area |
| | (Hypothalamus) |

[0301] In an aspect of a disclosed method of treating a hematological cancer, techniques to monitor, measure, and/or assess the status of a subject's hematological disease and/or disorder and/or cancer can comprise qualitative (or subjective) means as well as quantitative (or objective) means. In an aspect, microscopy can be used for the visualization of cells to determine morphology and staining characteristics. In an aspect, immunohistochemistry can be used to identify specific molecules in different kinds of cells and/or tissues. The tissue is treated with antibodies that bind to the specific molecule. These are made visible under a microscope by using a color reaction, a radioisotope, or a fluorescent dye. In an aspect, flow cytometry can be used to sort and collect cells for additional analyses as flow cytometer is capable of rapid, quantitative, multiparameter analysis of heterozygous cell populations on a cell-by-cell basis. In an aspect, immunophenotyping can be used to detect specific antigens and/or markers that are expressed on various cells. Immunophenotyping uses fluorochrome-tagged monoclonal antibodies to analyze heterogenous populations of cells. Fluorescence in situ hybridization (FISH) can be used to characterize structural chromosome abnormalities and identify chromosomes of uncertain origin. Cytogenetics can be used to analyze the chromosomes during metaphase as it describes the number of chromosomes and their appearance, thereby identifying chromosomal abnormalities. PCR can be used to amplify DNA and/or RNA for analyses. Gene expression profiles can be used to measure the activity of genes.

[0302] In an aspect, a disclosed method can further comprise decreasing and/or reducing one or more symptoms related to and/or associated with the subject's hematological cancer. In an aspect, decreasing and/or reducing one or more symptoms related to and/or associated with the subject's hematological cancer can a 10%, 20%, 30%, 40%, 50%, 60%, 70%, 80%, 90%, 100%, or any amount of decrease and/or reduction in the risk of and/or actual metastasis of cancer cells when compared to a control subject (such as, for example, a subject that has not received a disclosed treatment (e.g., a disclosed chimeric fusion protein or a pharmaceutical formulation thereof). In an aspect, preventing or inhibiting metastasis of cancer cells can comprise a 10-20%, 20-30%, 30-40%, 40-50%, 50-60%, 60-70%, 70-80%, 80-90%, or 90-100% or any amount of decrease and/or reduction in the risk of and/or actual metastasis of cancer cells when compared to a control subject (such as, for example, a subject that has not received a disclosed treatment (e.g., a disclosed chimeric fusion protein or a pharmaceutical formulation thereof).

[0303] In an aspect, a disclosed method of treating a hematological cancer can comprise stimulating an effector cell mediated immune modulator response to PS-expressing tumor cells. In an aspect, a disclosed method of treating a hematological cancer can induce a tumor reducing immune response. In an aspect, a disclosed method of treating a hematological cancer can induce phagocytosis of cancer cells in the subject. In an aspect, a disclosed method of treating a hematological cancer can cross-prime an anti-tumor T cell response. In an aspect, a disclosed method of treating a hematological cancer can induce a tumor eliminating immune response. In an aspect, a disclosed method of treating a hematological cancer can effect cell death of PS-expression cells. In an aspect, a disclosed method of treating a hematological cancer can comprise improving the efficacy of one or more anti-cancer therapies and/or treatments.

[0304] In an aspect, a disclosed method of treating a hematological cancer can comprise generating a disclosed chimeric fusion protein or pharmaceutical formulation thereof.

[0305] In an aspect, a disclosed method of treating a hematological cancer can comprise generating a disclosed chimeric fusion protein using one or more disclosed vectors and/or one or more disclosed plasmids and/or one or most disclosed cells and/or any combination thereof.

[0306] In an aspect, a disclosed method of treating a hematological cancer can comprise validating the efficacy and/or toxicity of disclosed chimeric fusion protein or pharmaceutical formulation thereof. In an aspect, validating the efficacy and/or toxicity of a disclosed chimeric fusion protein or pharmaceutical formulation thereof can comprise using an in vivo model and/or in vitro model.

[0307] In an aspect, a disclosed method of treating a hematological cancer can further comprise administering genetically modified cells expressing a chimeric antigen receptor targeting phosphatidylserine (PS) or a pharmaceutical formulation thereof or engineered T cells or NK cells or macrophages expressing a chimeric antigen receptor targeting phosphatidylserine (PS) or a pharmaceutical formulation thereof one or more times, administering one or more anti-cancer therapies one or more times, or administering any combination thereof one or more time.

[0308] In an aspect, a disclosed method of treating a hematological cancer can improve and/or extend the survivability of the subject, can improve a subject's quality of life, can increase and/or prolong a subject's life span, or any combination thereof. In an aspect, a disclosed method of treating a hematological cancer can stimulate an effector cell mediated immune modulator response to PS-expressing tumor cells. In an aspect, a disclosed method of treating a hematological cancer can induce a tumor reducing immune response. In an aspect, a disclosed method of treating a hematological cancer can induce phagocytosis of cancer cells in the subject. In an aspect, a disclosed method of treating a hematological cancer can cross-prime an anti-tumor T cell response. In an aspect, a disclosed method of treating a hematological cancer can induce a tumor eliminating immune response. In an aspect, a disclosed pharmaceutical formulation can treat cancer.

[0309] In an aspect of a disclosed method of treating a hematological cancer, a disclosed chimeric fusion protein can be replaced by a disclosed vector. In an aspect of a disclosed method of treating a hematological cancer, a disclosed chimeric fusion protein can be replaced by a disclosed nucleic acid molecule. In an aspect of a disclosed method of treating a hematological cancer, a disclosed chimeric fusion protein can be replaced by a disclosed plasmid. In an aspect of a disclosed method of treating a hematological cancer, a disclosed chimeric fusion protein can be replaced by a disclosed antibody drug conjugate. In an aspect of a disclosed method of treating a hematological cancer, a disclosed chimeric fusion protein can be replaced by a disclosed pharmaceutical formulation.

### F. Methods of Improving the Efficacy of Cancer Therapy

[0310] Disclosed herein is a method of improving the efficacy of cancer therapy, the method comprising treating a subject in need thereof by administering to the subject in need thereof a therapeutically effective amount of one or more cells transduced with a disclosed chimeric fusion protein or a pharmaceutical formulation thereof. Disclosed herein is a method of improving the efficacy of cancer therapy, the method comprising treating a subject in need thereof by administering to the subject in need thereof a therapeutically effective amount of a disclosed chimeric fusion protein or a pharmaceutical formulation thereof.

[0311] Disclosed herein is a method of improving the efficacy of cancer therapy, the method comprising treating a subject in need thereof by administering to the subject in need thereof a therapeutically effective amount of a disclosed chimeric fusion protein targeting phosphatidylserine (PS) or a pharmaceutical formulation thereof. Disclosed herein is a method of improving the efficacy of cancer therapy, the method comprising treating a subject in need thereof by administering to the subject in need thereof a therapeutically effective amount of a disclosed chimeric fusion protein targeting phosphatidylserine-expressing tumor cells or a pharmaceutical formulation thereof.

[0312] In an aspect, wherein the disclosed chimeric fusion protein targets phosphatidylserine (PS)-expressing cancer cells. In an aspect, wherein the disclosed chimeric fusion protein targets phosphatidylserine (PS)-expressing hematological cancer cells. In an aspect, disclosed PS-expressing cancer cells can be lymphoma cells, leukemia cells, and multiple myeloma cells. In an aspect, disclosed PS-expressing cancer cells can be acute myeloid leukemia (AML) or myelodysplastic syndrome. In an aspect, disclosed PS-expressing cancer cells can be blood borne.

[0313] In an aspect, a subject can be treatment-naïve. In an aspect, a subject has received one or more treatments prior to the administering of a disclosed chimeric fusion protein or pharmaceutical formulation thereof. In an aspect, one or more treatments can comprise one or more anti-cancer therapies and/or treatments.

[0314] In an aspect, a subject can have, be diagnosed with, or be suspected of having one or more cancers. In an aspect, a disclosed a method of improving the efficacy of cancer therapy can further comprise diagnosing the subject as have cancer or cancerous cells. In an aspect, a disclosed a method of improving the efficacy of cancer therapy can further comprise diagnosing the subject as having a hematological cancer or cancerous hematological cells.

[0315] In an aspect, a disclosed cancer can be a hematologic cancer. In an aspect, a disclosed hematological cancer can comprise lymphoma, myeloma, leukemia, or any combination thereof.

[0316] In an aspect, a subject can have, be diagnosed with, or be suspected of having one or more cancers. In an aspect, a subject can have, be diagnosed with, or be suspected of having a hematological cancer and one or more other cancers. In an aspect, other cancers can comprise ovarian cancer, ovarian adenocarcinoma, ovarian teratocarcinoma, lung cancer, small cell lung cancer (SCLC), non-small cell lung cancer (NSCLC), squamous cell lung carcinoma, adenocarcinoma, gastric cancer, breast cancer, hepatic cancer, pancreatic cancer, skin cancer, in particular basal cell carcinoma and squamous cell carcinoma, malignant melanoma, head and neck cancer, malignant pleomorphic adenoma, sarcoma, synovial sarcoma, carcinosarcoma, bile duct cancer, bladder cancer, transitional cell carcinoma, papillary carcinoma, kidney cancer, renal cell carcinoma, clear cell renal cell carcinoma, papillary renal cell carcinoma, colon cancer, small bowel cancer, small bowel adenocarcinoma, adenocarcinoma of the ileum, testicular embryonal carcinoma, placental choriocarcinoma, cervical cancer, testicular cancer, testicular seminoma, testicular teratoma, embryonic testicular cancer, uterine cancer, teratocarcinoma, embryonal carcinoma, or any combination thereof.

[0317] In an aspect, a disclosed method of improving the efficacy of cancer therapy can further comprise collecting one or more blood and/or biological samples from a subject at the same time or at different times. For example, in an aspect, a blood sample and/or a biological sample can be collected from a subject at a pre-determined interval. In an aspect, a pre-determined interval can be once a week, once every 2 weeks, once every 3 weeks, once every 4 weeks, once every 5 weeks, once every 6 weeks, once every 7 weeks, once every 8 weeks, or at a longer interval. In an aspect, a pre-determined interval can be once a month, once every 2 months, once every 3 months, once every 5 months, once every 5 months, once every 6 months, or at a longer interval. In an aspect, a blood sample and/or a biological sample can be collected from a subject prior to treatment, during treatment, after treatment, or any combination thereof. In an aspect, a blood and/or a biological sample can be collected from a subject at any time deemed medically and/or clinically appropriate by the skilled clinician.

[0318] In an aspect, a therapeutically effective amount or effective dose or effective amount or therapeutically effective dosage of a disclosed chimeric fusion protein or pharmaceutical formulation thereof can be any amount that, when used alone or in combination with another therapeutic agent, can attack and destroy PS-expressing tumor cells. In an aspect, a therapeutically effective amount or effective dose or effective amount or therapeutically effective dosage of a disclosed chimeric fusion protein or pharmaceutical formulation thereof can be any amount that, when used alone or in combination with another therapeutic agent, can attack and destroy PS-expressing tumor cells. In an aspect, a therapeutically effective amount or effective dose or effective amount or therapeutically effective dosage of a disclosed chimeric fusion protein or pharmaceutical formulation thereof can be any amount that can enhance the success rate of one or more conventional cytotoxic cancer therapies against PS-expressing tumor cells.

[0319] In an aspect, a disclosed therapeutically effective amount or effective dose of a disclosed chimeric fusion protein or pharmaceutical formulation thereof can be about 0.01 μg/kg to about 10 mg/kg per subject.

[0320] In an aspect, a therapeutically effective amount or effective dose or effective amount or therapeutically effective dosage of a disclosed chimeric fusion protein or pharmaceutical formulation thereof can protect a subject against the onset of a disease and/or promotes disease regression evidenced by a decrease in severity of disease symptoms, an increase in frequency and duration of disease symptom-free periods, or a prevention of impairment or disability due to the disease affliction. The ability of a therapeutic agent to promote disease regression can be evaluated using a variety of methods known to the skilled practitioner, such as in human subjects during clinical trials, in animal model systems predictive of efficacy in humans, or by assaying the activity of the agent in in vitro assays.

[0321] In an aspect, administering a disclosed chimeric fusion protein or pharmaceutical formulation thereof can comprise systemic or direct administration. In an aspect, administering can comprise oral administration, intravenous administration, intratumoral administration, intraperitoneal administration, intracranial administration, subcutaneous administration, intradermal administration, intrathecal administration, or any combination thereof. In an aspect, administering a disclosed chimeric fusion protein or pharmaceutical formulation thereof can be administered by any method of administration disclosed herein. In an aspect, a disclosed chimeric fusion protein or pharmaceutical formulation thereof can be administered via multiple routes either concurrently or sequentially.

[0322] For example, in an aspect, a disclosed chimeric fusion protein or pharmaceutical formulation thereof can be first administered intratumorally and then be administered intravenously. In an aspect, a disclosed chimeric fusion protein or pharmaceutical formulation thereof can be first administered intratumorally and then be administered orally. A skilled clinician can determine the best route of administration for a subject at a given time.

[0323] In an aspect, a disclosed method can comprise repeating the administering of a disclosed chimeric fusion protein or pharmaceutical formulation thereof.

[0324] In an aspect, a disclosed method of improving the efficacy of cancer therapy can comprise protecting the subject from metastasis. In an aspect, a disclosed method of improving the efficacy of cancer therapy can comprise reducing the risk of developing metastasis. In an aspect, a disclosed method of improving the efficacy of cancer therapy can comprise preventing or inhibiting metastasis.

[0325] In an aspect, a disclosed method of improving the efficacy of cancer therapy can comprise monitoring the subject for adverse effects. In an aspect, in the absence of adverse effects, a disclosed method can comprise continuing to treat the subject. In an aspect, continuing to treat the subject can comprise continuing to administer to the subject a disclosed chimeric fusion protein or pharmaceutical formulation thereof. In an aspect, in the presence of adverse effects, a disclosed method can comprise modifying one or more steps of the method. In an aspect, modifying one or more steps of a disclosed method can comprise modifying the administering step. In an aspect, modifying the administering step can comprise changing the amount of a disclosed chimeric fusion protein or pharmaceutical formulation thereof administered to the subject, changing the frequency of administration of a disclosed chimeric fusion protein or pharmaceutical formulation thereof, changing the duration of administration of a disclosed chimeric fusion protein or pharmaceutical formulation thereof, changing the route of administration of a disclosed chimeric fusion protein or pharmaceutical formulation thereof, or any combination thereof.

[0326] In an aspect, a disclosed method of improving the efficacy of cancer therapy can further comprise administering to the subject an immune checkpoint inhibitor (e.g., an anti-PD1 molecule). In an aspect, a disclosed anti-PD1 molecule can comprise an anti-PD1 antibody, an anti-PDL1 antibody, or any combination thereof. In an aspect, a disclosed anti-PD1 antibody can comprise a monoclonal antibody, a humanized monoclonal antibody, or a fragment thereof. In an aspect, a disclosed anti-PD1 antibody can comprise a polyclonal antibody, a humanized polyclonal antibody, or a fragment thereof. In an aspect, a disclosed anti-PD1 antibody can comprise any antibody or antibody fragment that specifically recognizes PD1. In an aspect, a disclosed anti-PDL1 antibody can comprise a monoclonal antibody, a humanized monoclonal antibody, or a fragment thereof. In an aspect, a disclosed anti-PDL1 antibody can comprise a polyclonal antibody, a humanized polyclonal antibody, or a fragment thereof. In an aspect, a disclosed anti-PDL1 antibody can comprise any antibody or antibody fragment that specifically recognizes PDL1. Antibodies and methods of preparing antibodies are known in the art. Similarly, recombinant antibodies and methods of preparing recombinant antibodies are known in the art.

[0327] In an aspect, a disclosed method of improving the efficacy of cancer therapy can further comprise repeating the administering of the anti-PD1 molecule. In an aspect, a disclosed anti-PD1 molecule can be administered prior to, concurrent with, or after the administration of the interfering molecule.

[0328] In an aspect of a disclosed method of improving the efficacy of cancer therapy, administering a disclosed anti-PD1 molecule can comprise systemic or direct administration. In an aspect, administering a disclosed anti-PD1 molecule can comprise intravenous administration, intratumoral administration, intraperitoneal administration, or any combination thereof. In an aspect, administering a disclosed can be administered by any method of administration disclosed herein. In an aspect, a disclosed anti-PD1 molecule can be administered via multiple routes either concurrently or sequentially. For example, in an aspect, a disclosed anti-PD1 molecule can be first administered intratumorally and then be administered intravenously. In an aspect, administering a disclosed anti-PD1 molecule can be first administered intratumorally and then be administered orally. A skilled clinician can determine the best route of administration for a subject at a given time.

[0329] For example, in an aspect, a disclosed anti-PD1 molecule can be administered about 3 months, about 2 months, or about 1 month prior to the administering of a disclosed chimeric fusion protein or pharmaceutical formulation thereof. In an aspect, a disclosed anti-PD1 molecule can be administered about 8 weeks, about 7 weeks, about 6 weeks, about 5 weeks, about 4 weeks, about 3 weeks, about 2 weeks, or about 1 week prior to the administering of a disclosed chimeric fusion protein or pharmaceutical formulation thereof. In an aspect, a disclosed anti-PD1 molecule can be administered about 30, 29, 28, 27, 26, 25, 24, 23, 22, 21, 20, 19, 18, 17, 16, 15, 14, 13, 12, 11, 10, 9, 8, 7, 6, 5, 4, 3, 2 or 1 day prior to the administering of a disclosed chimeric fusion protein or pharmaceutical formulation thereof. In an aspect, a disclosed anti-PD1 molecule can be administered about 24, 23, 22, 21, 20, 19, 18, 17, 16, 15, 14, 13, 12, 11, 10, 9, 8, 7, 6, 5, 4, 3, 2, or 1 hours prior to the administering of a disclosed chimeric fusion protein or pharmaceutical formulation thereof. In an aspect, a disclosed method of improving the efficacy of cancer therapy can further comprise repeating the administering of a disclosed anti-PD1 molecule. In an aspect, a disclosed anti-PD1 molecule can be administered prior to, concurrent with, or after the administration of the disclosed chimeric fusion protein.

[0330] In an aspect, a disclosed method of improving the efficacy of cancer therapy can comprise administering to the subject one or more additional anti-cancer therapies. Anti-cancer therapies are known to the art. In an aspect, a disclosed anti-cancer therapy can comprise endocrine therapy, radiotherapy, hormone therapy, gene therapy, thermal therapy, ultrasound therapy, or any combination thereof. In an aspect, a disclosed anti-cancer therapy can comprise one or more chemotherapeutic agents. In an aspect, a disclosed chemotherapeutic agent can comprise an anthracycline, a vinca alkaloid, an alkylating agent, an immune cell antibody, an antimetabolite, a TNFR glucocorticoid induced TNFR related protein (GITR) agonist, a proteasome inhibitor, an immunomodulator, or any combination thereof. In an aspect, a disclosed chemotherapeutic agent can comprise 5-fluorouracil (Adrucil, Efudex), 6-mercaptopurine (Purinethol), 6-thioguanine, aclarubicin or aclacinomycin A, alemtuzamab (Lemtrada), anastrozole (Arimidex), axitinib (Inlyta), bevacizumab (Avastin), bicalutamide (Casodex), bleomycin sulfate (Blenoxane), bortezomib (Velcade), busulfan (Myleran), busulfan injection (Busulfex), capecitabine (Xeloda), carboplatin (Paraplatin), carmustine (BiCNU), chlorambucil (Leukeran), cisplatin (Platinol), cladribine (Leustatin), Cosmegan, cyclophosphamide (Cytoxan or Neosar), cyclophosphamide, cytarabine liposome injection (DepoCyt), cytarabine, cytosine arabinoside (Cytosar-U), dacarbazine (DTIC-Dome), dactinomycin (Cosmegen), daunorubicin citrate liposome injection (DaunoXome), daunorubicin hydrochloride (Cerubidine), dexamethasone, docetaxel (Taxotere), doxorubicin hydrochloride (Adriamycin, Rubex), etoposide (Vepesid), fludarabine phosphate (Fludara), flutamide (Eulexin), folic acid antagonists, gemcitabine (difluorodeoxycitidine), gemtuzumab, gliotoxin, hydroxyurea (Hydrea), Idarubicin (Idamycin), ifosfamide (IFEX), ifosfamide, irinotecan (Camptosar), L-asparaginase (ELSPAR), lenalidomide), leucovorin calcium, melphalan (Alkeran), melphalan, methotrexate (Folex), mitoxantrone (Novantrone), mylotarg, N4-pentoxycarbonyl-5 deoxy-5-fluorocytidine, nab-paclitaxel (Abraxane), paclitaxel (Taxol), pentostatin, phoenix (Yttrium90/MX-DTPA), polifeprosan 20 with carmustine implant (Gliadel), purine analogs and adenosine deaminase inhibitors (fludarabine), pyrimidine analogs, rituximab, tamoxifen citrate (Nolvadex), temozolomide), teniposide (Vumon), tezacitibine, thalidomide or a thalidomide derivative, thiotepa, tirapazamine (Tirazone), topotecan hydrochloride for injection (Hycamptin), tositumomab), vinblastine (Velban), vinblastine, vincristine (Oncovin), vindesine, vinorelbine (Navelbine), or any combination thereof. In an aspect, a disclosed method of improving the efficacy of cancer therapy can further comprise repeating the administering of a disclosed chemotherapeutic agent. In an aspect, a disclosed chemotherapeutic agent can be administered prior to, concurrent with, or after the administration of the disclosed chimeric fusion protein.

[0331] In an aspect, a disclosed method of improving the efficacy of cancer therapy can comprise administering to the subject an anti-chemokine therapy. In an aspect, a disclosed anti-chemokine therapy can comprise one or more antibodies against CCL1, CCL2, CCL4, CCL17, CCL19, CCL21, CCL22, CCL25, CXCL9, CXCL10, CXCL11, CXCL12, CXCL13, CCR2, CCR5, CCR7, CCR8, CCR9, CXCR3, CXCR4, CXCR5, CX3CL1, CX3CR1, or any combination thereof. In an aspect, a disclosed method of improving the efficacy of cancer therapy can further comprise repeating the administering of a disclosed anti-chemokine therapy. In an aspect, a disclosed anti-chemokine therapy can be administered prior to, concurrent with, or after the administration of the disclosed chimeric fusion protein.

[0332] In an aspect, a disclosed method of improving the efficacy of cancer therapy can comprise administering an oligonucleotide therapeutic agent. A disclosed oligonucleotide therapeutic agent can comprise a single-stranded or double-stranded DNA, iRNA, shRNA, siRNA, mRNA, non-coding RNA (ncRNA), an antisense molecule, miRNA, a morpholino, a peptide-nucleic acid (PNA), or an analog or conjugate thereof. In an aspect, a disclosed oligonucleotide therapeutic agent can be an ASO or an RNAi. In an aspect, a disclosed oligonucleotide therapeutic agent can comprise one or more modifications at any position applicable. In an aspect, a disclosed oligonucleotide therapeutic agent can comprise a CRISPR-based endonuclease. In an aspect, a disclosed endonuclease can be Cas9. CRISPR/Cas9 systems and methods are known to the art. In an aspect, a disclosed method of improving the efficacy of cancer therapy can further comprise repeating the administering of a disclosed oligonucleotide therapeutic agent. In an aspect, a disclosed oligonucleotide therapeutic agent can be administered prior to, concurrent with, or after the administration of the disclosed chimeric fusion protein.

[0333] In an aspect, a disclosed method of improving the efficacy of cancer therapy can further comprise preventing or inhibiting metastasis of cancer cells. In an aspect, a disclosed method can comprise a 10%, 20%, 30%, 40%, 50%, 60%, 70%, 80%, 90%, 100%, or any amount of decrease and/or reduction in the risk of and/or actual metastasis of cancer cells when compared to a control subject (such as, for example, a subject that has not received a disclosed treatment (e.g., a disclosed chimeric fusion protein or a pharmaceutical formulation thereof)). In an aspect, preventing or inhibiting metastasis of cancer cells can comprise a 10-20%, 20-30%, 30-40%, 40-50%, 50-60%, 60-70%, 70-80%, 80-90%, or 90-100% or any amount of decrease and/or reduction in the risk of and/or actual metastasis of cancer cells when compared to a control subject (such as, for example, a subject that has not received a disclosed treatment (e.g., a disclosed chimeric fusion protein or a pharmaceutical formulation thereof).

[0334] In an aspect, a disclosed method of improving the efficacy of cancer therapy can comprise surgically resecting the tumor and/or cancer cells from the subject. In an aspect, following resecting the tumor and/or cancer cells from the subject, a disclosed method of improving the efficacy of cancer therapy can comprise continuing to administer to the subject a therapeutically effective amount of a disclosed chimeric fusion protein or a pharmaceutical formulation thereof and continuing to administer to the subject a therapeutically effective amount of an anti-PD1 molecule, a disclosed anti-chemokine therapy, a disclosed chemotherapeutic agent, any disclosed therapeutic agent, or any combination thereof.

[0335] In an aspect, a disclosed method of improving the efficacy of cancer therapy can further comprise subjecting the subject to one or more invasive or non-invasive diagnostic assessments. Diagnostic assessments are known to the art. In an aspect, a disclosed non-invasive diagnostic assessment can comprise x-rays, computerized tomography (CT) scans, magnetic resonance imaging (MRI) scans, ultrasounds, positron emission tomography (PET) scans, or any combination thereof. In an aspect, a disclosed invasive diagnostic assessment can comprise a tissue biopsy or exploratory surgery.

[0336] In an aspect, a disclosed method of improving the efficacy of cancer therapy can restore one or more aspects of cellular homeostasis and/or cellular functionality and/or metabolic dysregulation in a subject, such as, for example, a subject having cancer or cancerous cells. In an aspect, a disclosed chimeric fusion protein or pharmaceutical formulation thereof can restore one or more aspects of cellular homeostasis and/or cellular functionality and/or metabolic dysregulation in a subject having cancer. In an aspect, metabolic dysregulation can be associated with cancer or cancerous cells. In an aspect, restoring one or more aspects of cellular homeostasis and/or cellular functionality can comprise one or more of the following: (i) correcting cell starvation in one or more cell types; (ii) normalizing aspects of the autophagy pathway (such as, for example, correcting, preventing, reducing, and/or ameliorating autophagy); (iii) improving, enhancing, restoring, and/or preserving mitochondrial functionality and/or structural integrity; (iv) improving, enhancing, restoring, and/or preserving organelle functionality and/or structural integrity; (v) correcting enzyme dysregulation; (vi) reversing, inhibiting, preventing, stabilizing, and/or slowing the rate of progression of the multi-systemic manifestations of a cancer; (vii) reversing, inhibiting, preventing, stabilizing, and/or slowing the rate of progression of a cancer, or (viii) any combination thereof. In an aspect, restoring one or more aspects of cellular homeostasis can comprise improving, enhancing, restoring, and/or preserving one or more aspects of cellular structural and/or functional integrity. In an aspect, restoration can be a partial or incomplete restoration. In an aspect, restoration can be complete or near complete restoration such that the level of expression, activity, and/or functionality is similar to that of a wild-type or control level. In an aspect, restoring one or more aspects of cellular homeostasis and/or cellular functionality can comprise preventing or inhibiting metastasis of cancer cells in the subject.

[0337] In an aspect of a disclosed a method of improving the efficacy of cancer therapy, techniques to monitor, measure, and/or assess the restoring one or more aspects of cellular homeostasis and/or cellular functionality can comprise qualitative (or subjective) means as well as quantitative (or objective) means. These means are known to the skilled person. For example, representative regulated variables and sensors relating to systemic homeostasis are discussed supra.

[0338] In an aspect of a disclosed method of improving the efficacy of cancer therapy, techniques to monitor, measure, and/or assess the status of a subject's hematological disease and/or disorder and/or cancer can comprise qualitative (or subjective) means as well as quantitative (or objective) means. In an aspect, microscopy can be used for the visualization of cells to determine morphology and staining characteristics. In an aspect, immunohistochemistry can be used to identify specific molecules in different kinds of cells and/or tissues. The tissue is treated with antibodies that bind to the specific molecule. These are made visible under a microscope by using a color reaction, a radioisotope, or a fluorescent dye. In an aspect, flow cytometry can be used to sort and collect cells for additional analyses as flow cytometer is capable of rapid, quantitative, multiparameter analysis of heterozygous cell populations on a cell-by-cell basis. In an aspect, immunophenotyping can be used to detect specific antigens and/or markers that are expressed on various cells. Immunophenotyping uses fluorochrome-tagged monoclonal antibodies to analyze heterogenous populations of cells. Fluorescence in situ hybridization (FISH) can be used to characterize structural chromosome abnormalities and identify chromosomes of uncertain origin. Cytogenetics can be used to analyze the chromosomes during metaphase as it describes the number of chromosomes and their appearance, thereby identifying chromosomal abnormalities. PCR can be used to amplify DNA and/or RNA for analyses. Gene expression profiles can be used to measure the activity of genes.

[0339] In an aspect, a disclosed a method of improving the efficacy of cancer therapy can further comprise decreasing and/or reducing one or more symptoms related to and/or associated with the subject's hematological cancer. In an aspect, decreasing and/or reducing one or more symptoms related to and/or associated with the subject's hematological cancer can a 10%, 20%, 30%, 40%, 50%, 60%, 70%, 80%, 90%, 100%, or any amount of decrease and/or reduction in the risk of and/or actual metastasis of cancer cells when compared to a control subject (such as, for example, a subject that has not received a disclosed treatment (e.g., a disclosed chimeric fusion protein or a pharmaceutical formulation thereof). In an aspect, preventing or inhibiting metastasis of cancer cells can comprise a 10-20%, 20-30%, 30-40%, 40-50%, 50-60%, 60-70%, 70-80%, 80-90%, or 90-100% or any amount of decrease and/or reduction in the risk of and/or actual metastasis of cancer cells when compared to a control subject (such as, for example, a subject that has not received a disclosed treatment (e.g., a disclosed chimeric fusion protein or a pharmaceutical formulation thereof).

[0340] In an aspect, a disclosed method of improving the efficacy of cancer therapy can comprise stimulating an effector cell mediated immune modulator response to PS-expressing tumor cells. In an aspect, a disclosed method of improving the efficacy of cancer therapy can induce a tumor reducing immune response. In an aspect, a disclosed method of improving the efficacy of cancer therapy can induce phagocytosis of cancer cells in the subject. In an aspect, a disclosed method of improving the efficacy of cancer therapy cross-prime an anti-tumor T cell response. In an aspect, a disclosed method of improving the efficacy of cancer therapy can induce a tumor eliminating immune response. In an aspect, a disclosed method of improving the efficacy of cancer therapy can effect cell death of PS-expression cells. In an aspect, a disclosed method of improving the efficacy of cancer therapy can comprise improving the efficacy of one or more anti-cancer therapies and/or treatments.

[0341] In an aspect, a disclosed method of improving the efficacy of cancer therapy can comprise generating a disclosed chimeric fusion protein or pharmaceutical formulation thereof.

[0342] In an aspect, a disclosed method of improving the efficacy of cancer therapy can comprise generating a disclosed chimeric fusion protein using one or more disclosed vectors and/or one or more disclosed plasmids and/or one or most disclosed cells and/or any combination thereof.

[0343] In an aspect, a disclosed method of improving the efficacy of cancer therapy can comprise validating the efficacy and/or toxicity of disclosed chimeric fusion protein or pharmaceutical formulation thereof. In an aspect, validating the efficacy and/or toxicity of a disclosed chimeric fusion protein or pharmaceutical formulation thereof can comprise using an in vivo model and/or in vitro model.

[0344] In an aspect, a disclosed method of improving the efficacy of cancer therapy can further comprise administering genetically modified cells expressing a chimeric antigen receptor targeting phosphatidylserine (PS) or a pharmaceutical formulation thereof or engineered T cells or NK cells or macrophages expressing a chimeric antigen receptor targeting phosphatidylserine (PS) or a pharmaceutical formulation thereof one or more times, administering an anti-PD1 molecule one or more times, administering one or more anti-cancer therapies one or more times, or administering any combination thereof one or more time.

[0345] In an aspect, a disclosed method of treating a hematological cancer can improve and/or extend the survivability of the subject, can improve a subject's quality of life, can increase and/or prolong a subject's life span, or any combination thereof. In an aspect, a disclosed method of improving the efficacy of cancer therapy can stimulate an effector cell mediated immune modulator response to PS-expressing tumor cells. In an aspect, a disclosed method of improving the efficacy of cancer therapy can induce a tumor reducing immune response. In an aspect, a disclosed method of improving the efficacy of cancer therapy can induce phagocytosis of cancer cells in the subject. In an aspect, a disclosed method of improving the efficacy of cancer therapy can cross-prime an anti-tumor T cell response. In an aspect, a disclosed method of improving the efficacy of cancer therapy can induce a tumor eliminating immune response. In an aspect, a disclosed method of improving the efficacy of cancer therapy formulation can treat cancer.

[0346] In an aspect of a disclosed method of improving the efficacy of cancer therapy, a disclosed chimeric fusion protein can be replaced by a disclosed vector. In an aspect of a disclosed method of improving the efficacy of cancer therapy, a disclosed chimeric fusion protein can be replaced by a disclosed nucleic acid molecule. In an aspect of a disclosed method of improving the efficacy of cancer therapy, a disclosed chimeric fusion protein can be replaced by a disclosed plasmid. In an aspect of a disclosed method of improving the efficacy of cancer therapy, a disclosed chimeric fusion protein can be replaced by a disclosed antibody drug conjugate. In an aspect of a disclosed method of improving the efficacy of cancer therapy, a disclosed chimeric fusion protein can be replaced by a disclosed pharmaceutical formulation.

### G. Kits

[0347] Disclosed herein is a kit comprising one or more of a disclosed chimeric fusion protein, a disclosed pharmaceutical formulation, a disclosed isolated nucleic acid molecule, a disclosed vector, a disclosed host cell, or any combination thereof. Disclosed herein is a kit comprising one or more disclosed chimeric fusion proteins, one or more disclosed pharmaceutical formulations, one or more disclosed isolated nucleic acid molecule, one or more disclosed vectors, one or more disclosed host cells, or any combination thereof.

[0348] In an aspect, a disclosed kit can comprise one or more additional active agents and/or therapeutic agents. In an aspect, the one or more agents can treat, prevent, inhibit, and/or ameliorate one or more comorbidities in a subject. In an aspect, one or more active agents can treat, inhibit, prevent, and/or ameliorate cellular and/or metabolic complications related to cancer or cancer cells or cancerous cells.

[0349] In an aspect, a disclosed kit can comprise a disclosed chimeric fusion protein (e.g., SEQ ID NO:85, SEQ ID NO:86, SEQ ID NO:87, SEQ ID NO:88, SEQ ID NO:89, SEQ ID NO:90, SEQ ID NO:91, SEQ ID NO:92, SEQ ID NO:93, SEQ ID NO:94, SEQ ID NO:95, SEQ ID NO:96, SEQ ID NO:97, SEQ ID NO:99, SEQ ID NO:100, SEQ ID NO:101, SEQ ID NO:106, or a fragment thereof).

[0350] In an aspect, a disclosed kit can comprise a disclosed bispecific chimeric fusion protein as set forth FIG. 5A-FIG. 5H.

[0351] In an aspect, a disclosed kit can comprise at least two components constituting the kit. Together, the components constitute a functional unit for a given purpose (such as, for example, treating a subject diagnosed with or suspected of having a disease or disorder such as cancer). Individual member components may be physically packaged together or separately. For example, a kit comprising an instruction for using the kit may or may not physically include the instruction with other individual member components. Instead, the instruction can be supplied as a separate member component, either in a paper form or an electronic form which may be supplied on computer readable memory device or downloaded from an internet website, or as recorded presentation. In an aspect, a disclosed kit for use in a disclosed method can comprise one or more containers holding a disclosed chimeric fusion protein, a disclosed pharmaceutical formulation, a disclosed isolated nucleic acid molecule, a disclosed vector, a disclosed host cell, or any combination thereof, and a label or package insert with instructions for use. In an aspect, suitable containers include, for example, bottles, vials, syringes, blister pack, etc. The containers can be formed from a variety of materials such as glass or plastic. The container can hold a disclosed chimeric fusion protein, a disclosed pharmaceutical formulation, a disclosed isolated nucleic acid molecule, a disclosed vector, a disclosed host cell, or any combination thereof, and can have a sterile access port (for example the container may be an intravenous solution bag or a vial having a stopper pierceable by a hypodermic injection needle). The label or package insert can indicate a disclosed chimeric fusion protein, a disclosed pharmaceutical formulation, a disclosed isolated nucleic acid molecule, a disclosed vector, a disclosed host cell, or any combination thereof can be used for treating, preventing, inhibiting, and/or ameliorating a disease or disorder or complications and/or symptoms associated with a disease or disorder such as cancer or metastatic cancer. A kit can comprise additional components necessary for administration such as, for example, other buffers, diluents, filters, needles, and syringes.

[0352] In an aspect, a disclosed kit can be used to preventing or inhibiting metastasis of cancer cells. In an aspect, a disclosed kit can be used to risk of developing metastases. In an aspect, a disclosed kit can be used to validate the efficacy and/or toxicity of a disclosed chimeric fusion protein, a disclosed pharmaceutical formulation, a disclosed isolated nucleic acid molecule, a disclosed vector, a disclosed host cell, or any combination thereof.

[0353] In an aspect, a disclosed kit can be used to improve and/or extend the survivability of the subject, can improve a subject's quality of life, can increase and/or prolong a subject's life span, or any combination thereof. In an aspect, a disclosed kit can be used to can stimulate an effector cell mediated immune modulator response to PS-expressing tumor cells. In an aspect, a disclosed kit can be used to induce a tumor reducing immune response. In an aspect, a disclosed kit can be used to induce phagocytosis of cancer cells in the subject. In an aspect, a disclosed kit can be used to cross-prime an anti-tumor T cell response. In an aspect, a disclosed kit can be used to induce a tumor eliminating immune response. In an aspect, a disclosed kit can be used to treat cancer.

### H. Miscellaneous

[0354] Disclosed herein is a chimeric fusion protein, the chimeric fusion protein comprising phosphatidylserine (PS) binding domain, optionally a linker region, and an immunostimulatory domain. In an aspect of a disclosed chimeric fusion protein, a phosphatidylserine (PS)-binding domain comprises a naturally existing protein. In an aspect, a disclosed naturally exiting protein comprises (1) Human annexin A1 or its PS-binding core domain (aa41-346); (2) Human annexin A2; (3) Human annexin A3; (4) Human annexin A4; (5) Human annexin A5; (6) Human annexin A6; (7) Human annexin A7; (8) Human annexin A8; (9) Human annexin A8L1: (10) Human annexin A8L2; (11) Human annexin A9; (12) Human annexin A10; (13) Human annexin A11; (14) Human annexin A13; (15) Extracellular domain of human BAI1 (brain angiogenesis inhibitor 1); (16) Human beta 2-glycoprotein I; (17) Human factor II; (18) Human factor VII; (19) Huma factor IX; (20) Human factor X; (21) Human prothrombin; (22) Human growth arrest specific 6 (GAS6); (23) Human MFG-E8 (lactaherin); (24) Extracellular domain of human RAGE; (25) Protein S; (26) Extracellular domain of STABILIN 1 & 2; (27) Extracellular domain of TIM1; (28) Extracellular domain of Tim3; (29) Extracellular domain of TIM4; (30) Phosphoatidylserine receptor (PSR); (31) Human PKCa C2 domain (aa 157-288); (32) RAGE (receptor for advanced glycation end products); (33) Human synaptotagmin (Syt1) C2A domain (aa141-266); (34) Stabilin-1; (35) Stabilin-2; or any combinations thereof. In an aspect, a disclosed PS-binding domain comprises the single chain variable region (scFv) of known anti-PS antibodies. In an aspect, a disclosed anti-PS antibody comprises (1) Bavituximab; (2) PS binding antibody PGN632 (as published by Moody et al, JEM, 2010, 207:763-776); (3) PS binding antibody P1 (as published by Moody et al, JEM, 2010, 207:763-776); (4) PS binding antibody IS4 (as published by Moody et al, JEM, 2010, 207:763-776); (5) PS binding antibody CL1 (as published by Moody et al, JEM, 2010, 207:763-776); or any combinations thereof.

[0355] In an aspect, a disclosed chimeric fusion protein comprises an optional linker. In an aspect, a disclosed linker comprises (1) a flexile linker; (2) a rigid linker; (3) a Whitlow Linker; or any combinations thereof. In an aspect, a disclosed chimeric fusion protein comprises a Flexile linker.

[0356] In an aspect, a disclosed flexile linker comprises, but is not limited to, (GGGGS)n, where n=1-8; and (G)n, where n=1-8. In an aspect, a disclosed linker comprises a rigid linker. In an aspect, a disclosed rigid linker comprises, but is not limited to, (EAAAK)n, where n=1-8. In an aspect, a disclosed linker comprises a Whitlow linker. In an aspect, a disclosed Whitlow linker comprises (GSTSGSGKSSEGKG)n, or (GSTSGSGKPGSGEGSTKG)n, where n=1-8.

[0357] In an aspect, a disclosed immunostimulatory domain comprises the Fc domain of human IgG or a single chain antibody (scFv) to a human CD3 protein. In an aspect, a disclosed immunostimulatory domain comprises the Fc domain of human IgG selected from the group consisting of IgG1, IgG2, IgG3, IgG4 and combinations thereof. In an aspect, a disclosed immunostimulatory domain of a single chain antibody (scFv) to a human CD3 protein includes, but not limited to OKT3, humanized OKT3, or other published anti-human CD3 antibodies. In an aspect, an anti-CD3 antibody can comprise a OKT3 or humanized OKT3 antibody. In an aspect, an anti-CD3 anti-body can comprise OKT3 (muromab), ChAglyCD3 (otelixizumab), hOKT3γ1 (teplizumab), nuvion (visilizumab), NI-0401 (foralumab), a UCHT1 or humanized UCHT1 antibody, tepilizumab, TRX4 (otlixizumab), or any combination thereof. In an aspect, a dis-closed immunostimulatory domain can comprise one or more anti-CD3 antibodies.

[0358] Disclosed herein is a chimeric fusion protein, the chimeric fusion protein comprising phosphatidylserine (PS) binding domain comprising human annexin, optionally a linker region, and an immunostimulatory domain comprising the Fc domain of IgG1. In an aspect, a disclosed Annexin V-IgG1Fc fusion protein is further conjugated at the Fc region with a small molecule compound to enhance its cancer cell killing or immune-stimulating activities. In an aspect, a disclosed small molecule is selected from the group consisting of (1) Auristatins; (2) Maytasinoids; (3) Calichemicins; (4) Camptothecins; (5) STING agonists; (6) SN38 and combinations thereof. In an aspect, a disclosed PS binding domain-Fc fusion protein is further fused to an additional immune-stimulatory protein. In an aspect, a disclosed additional immune-stimulatory protein comprises a subdomain of human SIRPα(IgV domain) protein that can bind CD47. In an aspect, a disclosed additional immune-stimulatory protein comprises the extracellular domain of the NKG2D protein. In an aspect, a disclosed fusion protein comprises annexin V fused with a single-chain antibody (scFv) against CD3. In an aspect, a disclosed PS-binding domain fused with an scFv against CD3 is fused with an Fc domain, duplicated through a Fc hinge region, or fused with an Fc domain and paired with a Fc domain only.

[0359] Disclosed herein is a chimeric fusion protein comprising a heterozygous dimer of Annexin V-Fc:αCD3 scFv-Fc. In an aspect, a disclosed Annexin V is human annexin V or versions of Annexin V comprises at least 80% similarity to human Annexin V.

[0360] Disclosed herein is a pharmaceutical composition, the pharmaceutical composition comprising, a chimeric fusion protein as in any of the preceding claims and a pharmaceutically acceptable excipient, diluent, and/or carrier.

[0361] Disclosed herein is a method of treating hematological cancers by use of one or more chimeric fusion proteins as in any of the preceding claims such that the hematological cancer is treated in the subject. In an aspect, a disclosed method comprises further administering one or more additional therapeutic agents. In an aspect, a disclosed one or more additional therapeutic agents is selected from the group consisting of chemotherapy or radiotherapy to target those cancer cells that express phosphatidylserine on their surface but remain alive and escape cytotoxic therapy. In an aspect, disclosed hematological cancers are selected from the group consisting of lymphoma, leukemia, and multiple myeloma. In an aspect, the hematological cancer comprises acute myeloid leukemia (AML) or myelodysplastic syndrome. In an aspect, disclosed chimeric fusion proteins are administered to the subject by a method selected from the group consisting of: (i) Intravenous (IV); (ii) Intracranial; (iii) Intraperitoneal; (iv) Subcutaneously; (v) Intradermal; (vi) Intrathecal; and combinations thereof. In an aspect, disclosed chimeric fusion proteins are delivered by use of a DNA or RNA construct encoding the chimeric protein. In an aspect, disclosed chimeric fusion proteins are delivered by use of a DNA construct. In an aspect, a disclosed DNA construct is based on a vector/virus selected from the group consisting of adenovirus, lentivirus, AAV, HSV, plasmid vectors and combinations thereof encoding the chimeric protein. In an aspect, disclosed chimeric fusion proteins are delivered by use of an RNA construct. In an aspect, a disclosed RNA construct comprises an RNA that is synthesized in vivo through in vitro transcription of plasmid vectors.

| SEQ ID | | |
|---|---|---|
| NO. | Description of Sequence | Type |
| 1 | ANXA1 | human protein |
| 2 | ANXA1 (PS Binding Domain of 41-346) | human protein |
| 3 | ANXA2 | human protein |
| 4 | ANXA3 | human protein |
| 5 | ANXA4 | human protein |
| 6 | ANXA5 | human protein |
| 7 | ANXA6 | human protein |
| 8 | ANXA7 | human protein |
| 9 | ANXA8 | human protein |
| 10 | ANXA8L1 | human protein |
| 11 | ANXA9 | human protein |
| 12 | ANXA10 | human protein |
| 13 | ANXA11 | human protein |
| 14 | ANXA13 | human protein |
| 15 | ADGRB1 (BAI1) | human protein |
| 16 | ADGRB1 (BAI) (extracellular domain 31-948) | human protein |
| 17 | Apolipoprotein H (Beta-2-Glycoprotein I) | human protein |
| 18 | Coagulation Factor II | human protein |
| 19 | Coagulation Factor VII | human protein |
| 20 | Coagulation Factor IX | human protein |
| 21 | Coagulation Factor X | human protein |
| 22 | Growth Arrest Specific 6 | human protein |
| 23 | Milk Fat Globule EGF and Factor V/VIII Domain Containing | human protein |
| | (MFG-E8) (Lactadherin) | |
| 24 | AGER/RAGE | human protein |
| 25 | AGER/RAGE (ExD 23-342) | human protein |
| 26 | Protein S | human protein |
| 27 | Stabilin 1 | human protein |
| 28 | Stabilin 1 (ExD 26-2478) | human protein |
| 29 | Stabilin 2 | human protein |
| 30 | Stabilin 2 (ExD 20-2458) | human protein |
| 31 | Hepatitis A Virus Cellular Receptor 1/TIM1 | human protein |
| 32 | Hepatitis A Virus Cellular Receptor 1/TIM1 (ExD 21-295) | human protein |
| 33 | Hepatitis A Virus Cellular Receptor 2/TIM3 | human protein |
| 34 | Hepatitis A Virus Cellular Receptor 2/TIM3 (Ex 22-202) | human protein |
| 35 | T Cell Immunoglobulin And Mucin Domain Containing | human protein |
| | (TIMD4) | |
| 36 | T Cell Immunoglobulin And Mucin Domain Containing/ | human protein |
| | TIMD4 (ECD 25-314) | |
| 37 | Protein Kinase C Alpha | human protein |
| 38 | Protein Kinase C Alpha (C2 domain 158-275) | human protein |
| 39 | Synaptotagmin (SYT1) | human protein |
| 40 | Synaptotagmin (C2A domain 142-261) | human protein |
| 41 | Jumonji Domain Containing 6, Arginine Demethylase and | human protein |
| | Lysine Hydrolase (JMJD6) | |
| 42 | Annexin A1 | human genomic |
| 43 | Annexin A2 | human genomic |
| 44 | Annexin A3 | human genomic |
| 45 | Annexin A4 | human genomic |
| 46 | Annexin A5 | human genomic |
| 47 | Annexin A6 | human genomic |
| 48 | Annexin A7 | human genomic |
| 49 | Annexin A8 | human genomic |
| 50 | Annexin A8L1 | human genomic |
| 51 | Annexin A9 | human genomic |
| 52 | Annexin A10 | human genomic |
| 53 | Annexin A11 | human genomic |
| 54 | Annexin A13 | human genomic |
| 55 | scFV of Bavitixumab | synthetic |
| 56 | Annexin Al (mRNA - NM_000700.3) | human mRNA |
| 57 | Annexin A2 (mRNA transcript 1 - NM_001002858.3) | human mRNA |
| 58 | Annexin A2 (mRNA transcript 2 - NM_001002857.2) | human mRNA |
| 59 | Annexin A3 (mRNA transcript - NM_005139.3) | human mRNA |
| 60 | Annexin A4 (mRNA transcript 1 - NM_001320698.2) | human mRNA |
| 61 | Annexin A4 (mRNA transcript 2 - NM_001153.5) | human mRNA |
| 62 | Annexin A4 (mRNA transcript 3 - NM_001320700.2) | human mRNA |
| 63 | Annexin A4 (mRNA transcript 4 - NM_001320702.2) | human mRNA |
| 64 | Annexin A5 (mRNA - NM_001154.4) | human mRNA |
| 65 | Annexin A6 (mRNA transcript 1 - NM_001155.5) | human mRNA |
| 66 | Annexin A6 (mRNA transcript 2 - NM_001193544.2) | human mRNA |
| 67 | Annexin A6 (mRNA transcript 3 - NM_001363114.2) | human mRNA |
| 68 | Annexin A7 (mRNA transcript 1 - NM_001156.5) | human mRNA |
| 69 | Annexin A7 (mRNA transcript 2 - NM_0044.4) | human mRNA |
| 70 | Annexin A7 (mRNA transcript 3 - NM_001320880.2) | human mRNA |
| 71 | Annexin A7 (mRNA transcript 4 - NM_001320879.2) | human mRNA |
| 72 | Annexin A8 (mRNA transcript 1 - NM_001271702.2) | human mRNA |
| 73 | Annexin A8 (mRNA transcript 2 - NM_001040084.3) | human mRNA |
| 74 | Annexin A8 (mRNA transcript 3 - NM_0012717.2) | human mRNA |
| 75 | Annexin A8L1 (mRNA transcript 1 - NM_001098845.3) | human mRNA |
| 76 | Annexin A8L1 (mRNA transcript 2 - NM_001278924.2) | human mRNA |
| 77 | Annexin A8L1 (mRNA transcript 3 - NM_001278923.2 | human mRNA |
| 78 | Annexin A9 (mRNA transcript - NM_0568.3) | human mRNA |
| 79 | Annexin 10 (mRNA transcript 1 - NM_007193.5) | human mRNA |
| 80 | Annexin A11 (mRNA transcript a - NM_001157.3) | human mRNA |
| 81 | Annexin A11 (mRNA transcript b - NM_001278409.2) | human mRNA |
| 82 | Annexin A13 (mRNA transcript a - NM_004306.4) | human mRNA |
| 83 | Annexin A13 (mRNA transcript b - NM_0010954.3) | human mRNA |
| 84 | IgG1 | human protein |
| 85 | Annexin V-Fc(IgG1) Fusion Protein with Secretion Signal | synthetic |
| 86 | Annexin V-Fc(IgG1) Fusion Protein | synthetic |
| 87 | AnnexinV-Fc(IgG1)-NKG2D Fusion Protein | synthetic |
| 88 | AnnexinV-scFv(OKT3) Fusion Protein with Secretion Signal | synthetic |
| 89 | AnnexinV-scFv (OKT3) Fusion Protein | synthetic |
| 90 | Annexin-scFv(OKT198A) Fusion Protein with Secretion | synthetic |
| | Signal | |
| 91 | Annexin-scFv(OKT198A) Fusion Protein | synthetic |
| 92 | AnnexinV-scFv(OKT198C) Fusion Protein with Secretion | synthetic |
| | Signal | |
| 93 | AnnexinV-scFv(OKT198C) Fusion Protein | synthetic |
| 94 | AnnexinV-scFv(OKT207A) Fusion Protein with Secretion | synthetic |
| | Signal | |
| 95 | AnnexinV-scFv(OKT207A) Fusion Protein | synthetic |
| 96 | AnnexinV-scFv(OKT3)-Hinge Fusion Protein with Secretion | synthetic |
| | Signal | |
| 97 | AnnexinV-scFv(OKT3)-Hinge Fusion Protein | synthetic |
| 98 | SIRPα Signal | synthetic |
| 99 | SIRPα-AnnexinV-Fc(IgG1) Fusion Protein with Secretion | synthetic |
| | Signal | |
| 100 | SIRPα-AnnexinV-Fc Fusion Protein | synthetic |
| 101 | AnnexinV-Fc-SIRPα Fusion Protein | synthetic |
| 102 | KLRK1 | human protein |
| 103 | KLRK1 (extracellular domain) | human protein |
| 104 | KLRK1 | human genomic |
| 105 | KLRK1 | human mRNA |
| 106 | Annexin V (annexin A5)-Fc(IgG1)-NKG2D Fusion Protein | synthetic |
| 107 | Secretion Signal | synthetic |
| 108 | Secretion Signal | synthetic |
| 109 | Flexible Linker - type 1 (v1) | synthetic |
| 110 | Flexible Linker - type 1 (v2) | synthetic |
| 111 | Flexible Linker - type 1 (v3) | synthetic |
| 112 | Flexible Linker - type 1 (v4) | synthetic |
| 113 | Flexible Linker - type 1 (v5) | synthetic |
| 114 | Flexible Linker - type 1 (v6) | synthetic |
| 115 | Flexible Linker - type 1 (v7) | synthetic |
| 116 | Flexible Linker - type 1 (v8) | synthetic |
| 117 | Flexible Linker (G) | synthetic |
| 118 | Flexible Linker (GG) | synthetic |
| 119 | Flexible Linker (GGG) | synthetic |
| 120 | Flexible Linker (GGGG) | synthetic |
| 121 | Flexible Linker (GGGGG) | synthetic |
| 122 | Flexible Linker (GGGGGG) | synthetic |
| 123 | Flexible Linker (GGGGGGG) | synthetic |
| 124 | Flexible Linker (GGGGGGGG) | synthetic |
| 125 | Rigid Linker (v1) | synthetic |
| 126 | Rigid Linker (v2) | synthetic |
| 127 | Rigid Linker (v3) | synthetic |
| 128 | Rigid Linker (v4) | synthetic |
| 129 | Rigid Linker (v5) | synthetic |
| 130 | Rigid Linker (v6) | synthetic |
| 131 | Rigid Linker (v7) | synthetic |
| 132 | Rigid Linker (v8) | synthetic |
| 133 | Whitlow Linker - type 1 (v1) | synthetic |
| 134 | Whitlow Linker - type 1 (v2) | synthetic |
| 135 | Whitlow Linker - type 1 (v3) | synthetic |
| 136 | Whitlow Linker - type 1 (v4) | synthetic |
| 137 | Whitlow Linker - type 1 (v5) | synthetic |
| 138 | Whitlow Linker - type 1 (v6) | synthetic |
| 139 | Whitlow Linker - type 1 (v7) | synthetic |
| 140 | Whitlow Linker - type 1 (v8) | synthetic |
| 141 | Whitlow Linker - type 2 (v1) | synthetic |
| 142 | Whitlow Linker - type 2 (v2) | synthetic |
| 143 | Whitlow Linker - type 2 (v3) | synthetic |
| 144 | Whitlow Linker - type 2 (v4) | synthetic |
| 145 | Whitlow Linker - type 2 (v5) | synthetic |
| 146 | Whitlow Linker - type 2 (v6) | synthetic |
| 147 | Whitlow Linker - type 2 (v7) | synthetic |
| 148 | Whitlow Linker - type 2 (v8) | synthetic |

### EXAMPLES

[0362] Most of the current paradigms for cancer therapy assume that PS-expressing tumor cells, either from exposure to internal or external stressors, are destined to die from apoptosis. But data provided herein showed that some of these PS-expressing tumor cells survived. As detailed herein, the compositions and methods described herein can significantly enhance the success rate of conventional cytotoxic cancer therapy.

[0363] The Examples that follow are illustrative of specific aspects of the invention, and various uses thereof. They set forth for explanatory purposes only and are not to be taken as limiting the invention.

### Example 1

### Examination of Survival of Phosphatidylserine-Positive Tumor Cells

[0364] To determine whether cells expression high-level of PS expression on the cell surface are destined to die, the viability of c1498 murine AML (Acute Myeloid Leukemia) cells treated with cytarabine (part of a classical chemotherapy regimen for human AML) was examined. Specifically, whether cell surface PS-expressing acute myelocytic leukemia (AML) cells survived was examined. FACS was used to identify and sort cells with high cell surface PS-expression and the ability to survive was measured. FIG. 1A-FIG. 1B). In FIG. 1A, FACS sorting of untreated c1498 cells (in DMEM with 8% FBS). The rectangles indicate the sorted cells. In FIG. 1B, FACS sorting of c1498 cells treated with cytarabine (1 μM) for 24 hrs). The data indicated the following: (i) about 22-25% of untreated c1498 cells are either PS+7AAD-(7AAD is a fluorescent dye used to detect membrane integrity), early apoptotic cells, or PS+7AAD+, late apoptotic cells, remained alive and could proliferate in a robust manner (FIG. 1C), and (ii) about 25% or 8% of cytarabine-treated PS+7AAD-c1498 cells or PS+7AAD+ c1498 cells remained viable and could proliferate (FIG. 1C). These results indicated that a substantial proportion of PS+ cells (which the art presumed should be dead and/or destined to die), survived the initiation of the apoptotic process. The fact that these cells could survive indicated that new agents and/or treatment methods are needed to prevent tumor relapse. In FIG. 1C, about 1000 each of the sorted cells were placed into multi-well plates. When the cells reached sufficient numbers, the cells were counted at different time points to measure growth rates. The growth rates were then used to estimate the initial live cell numbers. The following formula was used to calculate the minimal initial live cell numbers: Minimal initial cell number=Total cell population/(growth rate*t(days to reach the current cell number).

### Example 2

### Annexin V-Fc Fusion Protein Mediated Phagocytosis of PS-Positive Tumor Cells

[0365] The ability of THP1-derived macrophages to phagocytose control or doxorubicin-treated c1498 cells was examined. FIG. 2A-FIG. 2B show that Annexin V-IgG1Fc fusion protein effectively boosted the phagocytosis of untreated or doxorubicin-treated c1498 cells. Representative fluorescence images of phagocytosis assay. THP1 cells transduced with mCherry were differentiated into macrophages following previously established procedures. The cells were then incubated with non-treated or doxorubicin-treated KG1a human AML cell line transduced with EGFP in the presence of either isotype control (IgG1) or AnnexinV-IgG1Fc. After 2 hrs of incubation, the macrophages and the KG1a cells they have engulfed were counted (FIG. 2A). Quantitative estimates of phagocytosis of KG1a cells by THP1-derived macrophages, the phagocytic index was calculated as: (Average number of KG1a cells engulfed per macrophage)×(percentage of macrophages which have engulfed KG1a cells)×200 (FIG. 2B).

### Example 3

Effective Treatment of c1498 AML Leukemia In Vivo by Use of Combined Chemotherapy and Annexin V-Fc Fusion Protein

[0366] Whether Annexin V-IgG1Fc fusion protein can enhance the treatment of c1498 AML in syngeneic mice (C57BL/6) in combination with cytarabine, a commonly used drug for AML treatment, was examined. FIG. 3 shows that while neither cytarabine nor Annexin V-IgG1Fc fusion protein treatment significantly extended the survival of c1498-injected mice, the combination treatment significantly extended the median survival of host mice (>62 days for combination group vs, 27 days or less for the other groups). Here, about 2×10⁵ c1498 cells were injected into the tail vein of C57BL/6 mice. At 24 hrs after the injection, the mice were treated with 100 mg/kg cytarabine (injected i.p. every 12 hrs for 3 times). At 24 hrs after the last treatment, Annexin V-Fc was given i.p. 4 times at 72 hours intervals. The mice were then observed and sacrificed until they are moribund. FIG. 3 shows the survival of different mice after they were treated with different antibody and drug combinations.

### Example 4

### Effective Killing of Human AML (Acute Myeloid Leukemia) Cells by PBMC Cells in the Presence of Bispecific T-Cell Engagers (Bite) Targeting PS and CD3

[0367] To determine whether a bi-specific T cell engager targeting phosphatidylserine (PS) could active T cells to kill AML cells, two dimerized BiTE proteins (AnnexinV-OKT3-Fc or AnnexinV-OKT3-hinge) were evaluated for efficacy to activate T cells to kill MV-4-11 human AML cells. FIG. 4 shows that both forms of BiTE could effectively mediate the killing of MV-4-11 cells in the presence of PBMC. Luciferase-labeled MV4-11 AML cells were mixed with PBMC cells at a ratio of 1:10. Bispecific proteins AnnexinV-scFv(OKT3)-Fc and AnnexinV-scFv(OKT3)-Hinge were added to the mixed cell population at different concentrations in 96-well plates. The survival of the MV4-11 cells were then quantified by measuring the luciferase activities of individual wells at 24 hrs post-bispecific protein addition (n=3).

### SUMMARY OF SPECIFIC EXAMPLES

[0368] As demonstrated herein, chimeric fusion proteins comprising a PS-binding domain increased the efficacy of chemotherapy. The Examples showed clearly that AML cells expressing PS were alive and proliferated in a robust manner (FIG. 1). These cells, previously thought to be destined to die and therefore irrelevant, were thus “survivors” that could propel the relapse of AML. Indeed, the data in FIG. 3 suggest that a fusion protein targeting PS could significantly enhance the therapeutic efficacy of chemotherapy provided strong support for our hypothesis. Similarly, the data in FIG. 4 provided additional support that PS-targeting bispecific engager effectively killed AML cells in the presence of T cells. These data provided strong support for the notion that direct targeting of PS on cancer cells could be an effective therapeutic strategy, which is against the prevailing view in the field currently.

The application's sequence listing, which the Patent Office published only in electronic form, follows.

SEQUENCE LISTING (148 sequences)

SEQ ID NO: 1 - protein, 346 aa, Homo sapiens
MAMVSEFLKQAWFIENEEQEYVQTVKSSKGGPGSAVSPYPTFNPSSDVAALHKAIMVKGVDEATIIDILTKRNNAQRQQIKAAYLQETGKPLDETLKKALTGHLEEVVLALLKTPAQFDADELRAAMKGLGTDEDTLIEILASRTNKEIRDINRVYREELKRDLAKDITSDTSGDFRNALLSLAKGDRSEDFGVNEDLADSDARALYEAGERRKGTDVNVFNTILTTRSYPQLRRVFQKYTKYSKHDMNKVLDLELKGDIEKCLTAIVKCATSKPAFFAEKLHQAMKGVGTRHKALIRIMVSRSEIDMNDIKAFYQKMYGISLCQAILDETKGDYEKILVALCGGN

SEQ ID NO: 2 - protein, 306 aa, Homo sapiens
TFNPSSDVAALHKAIMVKGVDEATIIDILTKRNNAQRQQIKAAYLQETGKPLDETLKKALTGHLEEVVLALLKTPAQFDADELRAAMKGLGTDEDTLIEILASRTNKEIRDINRVYREELKRDLAKDITSDTSGDFRNALLSLAKGDRSEDFGVNEDLADSDARALYEAGERRKGTDVNVFNTILTTRSYPQLRRVFQKYTKYSKHDMNKVLDLELKGDIEKCLTAIVKCATSKPAFFAEKLHQAMKGVGTRHKALIRIMVSRSEIDMNDIKAFYQKMYGISLCQAILDETKGDYEKILVALCGGN

SEQ ID NO: 3 - protein, 339 aa, Homo sapiens
MSTVHEILCKLSLEGDHSTPPSAYGSVKAYTNFDAERDALNIETAIKTKGVDEVTIVNILTNRSNAQRQDIAFAYQRRTKKELASALKSALSGHLETVILGLLKTPAQYDASELKASMKGLGTDEDSLIEIICSRTNQELQEINRVYKEMYKTDLEKDIISDTSGDFRKLMVALAKGRRAEDGSVIDYELIDQDARDLYDAGVKRKGTDVPKWISIMTERSVPHLQKVFDRYKSYSPYDMLESIRKEVKGDLENAFLNLVQCIQNKPLYFADRLYDSMKGKGTRDKVLIRIMVSRSEVDMLKIRSEFKRKYGKSLYYYIQQDTKGDYQKALLYLCGGDD

SEQ ID NO: 4 - protein, 323 aa, Homo sapiens
MASIWVGHRGTVRDYPDFSPSVDAEAIQKAIRGIGTDEKMLISILTERSNAQRQLIVKEYQAAYGKELKDDLKGDLSGHFEHLMVALVTPPAVFDAKQLKKSMKGAGTNEDALIEILTTRTSRQMKDISQAYYTVYKKSLGDDISSETSGDFRKALLTLADGRRDESLKVDEHLAKQDAQILYKAGENRWGTDEDKFTEILCLRSFPQLKLTFDEYRNISQKDIVDSIKGELSGHFEDLLLAIVNCVRNTPAFLAERLHRALKGIGTDEFTLNRIMVSRSEIDLLDIRTEFKKHYGYSLYSAIKSDTSGDYEITLLKICGGDD

SEQ ID NO: 5 - protein, 319 aa, Homo sapiens
MATKGGTVKAASGFNAMEDAQTLRKAMKGLGTDEDAIISVLAYRNTAQRQEIRTAYKSTIGRDLIDDLKSELSGNFEQVIVGMMTPTVLYDVQELRRAMKGAGTDEGCLIEILASRTPEEIRRISQTYQQQYGRSLEDDIRSDTSFMFQRVLVSLSAGGRDEGNYLDDALVRQDAQDLYEAGEKKWGTDEVKFLTVLCSRNRNHLLHVFDEYKRISQKDIEQSIKSETSGSFEDALLAIVKCMRNKSAYFAEKLYKSMKGLGTDDNTLIRVMVSRAEIDMLDIRAHFKRLYGKSLYSFIKGDTSGDYRKVLLVLCGGDD

SEQ ID NO: 6 - protein, 320 aa, Homo sapiens
MAQVLRGTVTDFPGFDERADAETLRKAMKGLGTDEESILTLLTSRSNAQRQEISAAFKTLFGRDLLDDLKSELTGKFEKLIVALMKPSRLYDAYELKHALKGAGTNEKVLTEIIASRTPEELRAIKQVYEEEYGSSLEDDVVGDTSGYYQRMLVVLLQANRDPDAGIDEAQVEQDAQALFQAGELKWGTDEEKFITIFGTRSVSHLRKVFDKYMTISGFQIEETIDRETSGNLEQLLLAVVKSIRSIPAYLAETLYYAMKGAGTDDHTLIRVMVSRSEIDLFNIRKEFRKNFATSLYSMIKGDTSGDYKKALLLLCGEDD

SEQ ID NO: 7 - protein, 673 aa, Homo sapiens
MAKPAQGAKYRGSIHDFPGFDPNQDAEALYTAMKGFGSDKEAILDIITSRSNRQRQEVCQSYKSLYGKDLIADLKYELTGKFERLIVGLMRPPAYCDAKEIKDAISGIGTDEKCLIEILASRTNEQMHQLVAAYKDAYERDLEADIIGDTSGHFQKMLVVLLQGTREEDDVVSEDLVQQDVQDLYEAGELKWGTDEAQFIYILGNRSKQHLRLVFDEYLKTTGKPIEASIRGELSGDFEKLMLAVVKCIRSTPEYFAERLFKAMKGLGTRDNTLIRIMVSRSELDMLDIREIFRTKYEKSLYSMIKNDTSGEYKKTLLKLSGGDDDAAGQFFPEAAQVAYQMWELSAVARVELKGTVRPANDFNPDADAKALRKAMKGLGTDEDTIIDIITHRSNVQRQQIRQTFKSHFGRDLMTDLKSEISGDLARLILGLMMPPAHYDAKQLKKAMEGAGTDEKALIEILATRTNAEIRAINEAYKEDYHKSLEDALSSDTSGHFRRILISLATGHREEGGENLDQAREDAQVAAEILEIADTPSGDKTSLETRFMTILCTRSYPHLRRVFQEFIKMTNYDVEHTIKKEMSGDVRDAFVAIVQSVKNKPLFFADKLYKSMKGAGTDEKTLTRIMVSRSEIDLLNIRREFIEKYDKSLHQAIEGDTSGDFLKALLALCGGED

SEQ ID NO: 8 - protein, 488 aa, Homo sapiens
MSYPGYPPTGYPPFPGYPPAGQESSFPPSGQYPYPSGFPPMGGGAYPQVPSSGYPGAGGYPAPGGYPAPGGYPGAPQPGGAPSYPGVPPGQGFGVPPGGAGFSGYPQPPSQSYGGGPAQVPLPGGFPGGQMPSQYPGGQPTYPSQINTDSFSSYPVFSPVSLDYSSEPATVTQVTQGTIRPAANFDAIRDAEILRKAMKGFGTDEQAIVDVVANRSNDQRQKIKAAFKTSYGKDLIKDLKSELSGNMEELILALFMPPTYYDAWSLRKAMQGAGTQERVLIEILCTRTNQEIREIVRCYQSEFGRDLEKDIRSDTSGHFERLLVSMCQGNRDENQSINHQMAQEDAQRLYQAGEGRLGTDESCFNMILATRSFPQLRATMEAYSRMANRDLLSSVSREFSGYVESGLKTILQCALNRPAFFAERLYYAMKGAGTDDSTLVRIVVTRSEIDLVQIKQMFAQMYQKTLGTMIAGDTSGDYRRLLLAIVGQ

SEQ ID NO: 9 - protein, 327 aa, Homo sapiens
MAWWKSWIEQEGVTVKSSSHFNPDPDAETLYKAMKGIGTNEQAIIDVLTKRSNTQRQQIAKSFKAQFGKDLTETLKSELSGKFERLIVALMYPPYRYEAKELHDAMKGLGTKEGVIIEILASRTKNQLREIMKAYEEDYGSSLEEDIQADTSGYLERILVCLLQGSRDDVSSFVDPGLALQDAQDLYAAGEKIRGTDEMKFITILCTRSATHLLRVFEEYEKIANKSIEDSIKSETHGSLEEAMLTVVKCTQNLHSYFAERLYYAMKGAGTRDGTLIRNIVSRSEIDLNLIKCHFKKMYGKTLSSMIMEDTSGDYKNALLSLVGSDP

SEQ ID NO: 10 - protein, 327 aa, Homo sapiens
MAWWKAWIEQEGVTVKSSSHFNPDPDAETLYKAMKGIGTNEQAIIDVLTKRSNTQRQQIAKSFKAQFGKDLTETLKSELSGKFERLIVALMYPPYRYEAKELHDAMKGLGTKEGVIIEILASRTKNQLREIMKAYEEDYGSSLEEDIQADTSGYLERILVCLLQGSRDDVSSFVDPALALQDAQDLYAAGEKIRGTDEMKFITILCTRSATHLLRVFEEYEKIANKSIEDSIKSETHGSLEEAMLTVVKCTQNLHSYFAERLYYAMKGAGTRDGTLIRNIVSRSEIDLNLIKCHFKKMYGKTLSSMIMEDTSGDYKNALLSLVGSDP

SEQ ID NO: 11 - protein, 345 aa, Homo sapiens
MSVTGGKMAPSLTQEILSHLGLASKTAAWGTLGTLRTFLNFSVDKDAQRLLRAITGQGVDRSAIVDVLTNRSREQRQLISRNFQERTQQDLMKSLQAALSGNLERIVMALLQPTAQFDAQELRTALKASDSAVDVAIEILATRTPPQLQECLAVYKHNFQVEAVDDITSETSGILQDLLLALAKGGRDSYSGIIDYNLAEQDVQALQRAEGPSREETWVPVFTQRNPEHLIRVFDQYQRSTGQELEEAVQNRFHGDAQVALLGLASVIKNTPLYFADKLHQALQETEPNYQVLIRILISRCETDLLSIRAEFRKKFGKSLYSSLQDAVKGDCQSALLALCRAEDM

SEQ ID NO: 12 - protein, 324 aa, Homo sapiens
MFCGDYVQGTIFPAPNFNPIMDAQMLGGALQGFDCDKDMLINILTQRCNAQRMMIAEAYQSMYGRDLIGDMREQLSDHFKDVMAGLMYPPPLYDAHELWHAMKGVGTDENCLIEILASRTNGEIFQMREAYCLQYSNNLQEDIYSETSGHFRDTLMNLVQGTREEGYTDPAMAAQDAMVLWEACQQKTGEHKTMLQMILCNKSYQQLRLVFQEFQNISGQDMVDAINECYDGYFQELLVAIVLCVRDKPAYFAYRLYSAIHDFGFHNKTVIRILIARSEIDLLTIRKRYKERYGKSLFHDIRNFASGHYKKALLAICAGDAEDY

SEQ ID NO: 13 - protein, 505 aa, Homo sapiens
MSYPGYPPPPGGYPPAAPGGGPWGGAAYPPPPSMPPIGLDNVATYAGQFNQDYLSGMAANMSGTFGGANMPNLYPGAPGAGYPPVPPGGFGQPPSAQQPVPPYGMYPPPGGNPPSRMPSYPPYPGAPVPGQPMPPPGQQPPGAYPGQPPVTYPGQPPVPLPGQQQPVPSYPGYPGSGTVTPAVPPTQFGSRGTITDAPGFDPLRDAEVLRKAMKGFGTDEQAIIDCLGSRSNKQRQQILLSFKTAYGKDLIKDLKSELSGNFEKTILALMKTPVLFDIYEIKEAIKGVGTDEACLIEILASRSNEHIRELNRAYKAEFKKTLEEAIRSDTSGHFQRLLISLSQGNRDESTNVDMSLAQRDAQELYAAGENRLGTDESKFNAVLCSRSRAHLVAVFNEYQRMTGRDIEKSICREMSGDLEEGMLAVVKCLKNTPAFFAERLNKAMRGAGTKDRTLIRIMVSRSETDLLDIRSEYKRMYGKSLYHDISGDTSGDYRKILLKICGGND

SEQ ID NO: 14 - protein, 316 aa, Homo sapiens
MGNRHAKASSPQGFDVDRDAKKLNKACKGMGTNEAAIIEILSGRTSDERQQIKQKYKATYGKELEEVLKSELSGNFEKTALALLDRPSEYAARQLQKAMKGLGTDESVLIEVLCTRTNKEIIAIKEAYQRLFDRSLESDVKGDTSGNLKKILVSLLQANRNEGDDVDKDLAGQDAKDLYDAGEGRWGTDELAFNEVLAKRSYKQLRATFQAYQILIGKDIEEAIEEETSGDLQKAYLTLVRCAQDCEDYFAERLYKSMKGAGTDEETLIRIVVTRAEVDLQGIKAKFQEKYQKSLSDMVRSDTSGDFRKLLVALLH

SEQ ID NO: 15 - protein, 1584 aa, Homo sapiens
MRGQAAAPGPVWILAPLLLLLLLLGRRARAAAGADAGPGPEPCATLVQGKFFGYFSAAAVFPANASRCSWTLRNPDPRRYTLYMKVAKAPVPCSGPGRVRTYQFDSFLESTRTYLGVESFDEVLRLCDPSAPLAFLQASKQFLQMRRQQPPQHDGLRPRAGPPGPTDDFSVEYLVVGNRNPSRAACQMLCRWLDACLAGSRSSHPCGIMQTPCACLGGEAGGPAAGPLAPRGDVCLRDAVAGGPENCLTSLTQDRGGHGATGGWKLWSLWGECTRDCGGGLQTRTRTCLPAPGVEGGGCEGVLEEGRQCNREACGPAGRTSSRSQSLRSTDARRREELGDELQQFGFPAPQTGDPAAEEWSPWSVCSSTCGEGWQTRTRFCVSSSYSTQCSGPLREQRLCNNSAVCPVHGAWDEWSPWSLCSSTCGRGFRDRTRTCRPPQFGGNPCEGPEKQTKFCNIALCPGRAVDGNWNEWSSWSACSASCSQGRQQRTRECNGPSYGGAECQGHWVETRDCFLQQCPVDGKWQAWASWGSCSVTCGAGSQRRERVCSGPFFGGAACQGPQDEYRQCGTQRCPEPHEICDEDNFGAVIWKETPAGEVAAVRCPRNATGLILRRCELDEEGIAYWEPPTYIRCVSIDYRNIQMMTREHLAKAQRGLPGEGVSEVIQTLVEISQDGTSYSGDLLSTIDVLRNMTEIFRRAYYSPTPGDVQNFVQILSNLLAEENRDKWEEAQLAGPNAKELFRLVEDFVDVIGFRMKDLRDAYQVTDNLVLSIHKLPASGATDISFPMKGWRATGDWAKVPEDRVTVSKSVFSTGLTEADEASVFVVGTVLYRNLGSFLALQRNTTVLNSKVISVTVKPPPRSLRTPLEIEFAHMYNGTTNQTCILWDETDVPSSSAPPQLGPWSWRGCRTVPLDALRTRCLCDRLSTFAILAQLSADANMEKATLPSVTLIVGCGVSSLTLLMLVIIYVSVWRYIRSERSVILINFCLSIISSNALILIGQTQTRNKVVCTLVAAFLHFFFLSSFCWVLTEAWQSYMAVTGHLRNRLIRKRFLCLGWGLPALVVAISVGFTKAKGYSTMNYCWLSLEGGLLYAFVGPAAAVVLVNMVIGILVFNKLVSKDGITDKKLKERAGASLWSSCVVLPLLALTWMSAVLAVTDRRSALFQILFAVFDSLEGFVIVMVHCILRREVQDAVKCRVVDRQEEGNGDSGGSFQNGHAQLMTDFEKDVDLACRSVLNKDIAACRTATITGTLKRPSLPEEEKLKLAHAKGPPTNFNSLPANVSKLHLHGSPRYPGGPLPDFPNHSLTLKRDKAPKSSFVGDGDIFKKLDSELSRAQEKALDTSYVILPTATATLRPKPKEEPKYSIHIDQMPQTRLIHLSTAPEASLPARSPPSRQPPSGGPPEAPPAQPPPPPPPPPPPPQQPLPPPPNLEPAPPSLGDPGEPAAHPGPSTGPSTKNENVATLSVSSLERRKSRYAELDFEKIMHTRKRHQDMFQDLNRKLQHAAEKDKEVLGPDSKPEKQQTPNKRPWESLRKAHGTPTWVKKELEPLQPSPLELRSVEWERSGATIPLVGQDIIDLQTEV

SEQ ID NO: 16 - protein, 918 aa, Homo sapiens
AAGADAGPGPEPCATLVQGKFFGYFSAAAVFPANASRCSWTLRNPDPRRYTLYMKVAKAPVPCSGPGRVRTYQFDSFLESTRTYLGVESFDEVLRLCDPSAPLAFLQASKQFLQMRRQQPPQHDGLRPRAGPPGPTDDFSVEYLVVGNRNPSRAACQMLCRWLDACLAGSRSSHPCGIMQTPCACLGGEAGGPAAGPLAPRGDVCLRDAVAGGPENCLTSLTQDRGGHGATGGWKLWSLWGECTRDCGGGLQTRTRTCLPAPGVEGGGCEGVLEEGRQCNREACGPAGRTSSRSQSLRSTDARRREELGDELQQFGFPAPQTGDPAAEEWSPWSVCSSTCGEGWQTRTRFCVSSSYSTQCSGPLREQRLCNNSAVCPVHGAWDEWSPWSLCSSTCGRGFRDRTRTCRPPQFGGNPCEGPEKQTKFCNIALCPGRAVDGNWNEWSSWSACSASCSQGRQQRTRECNGPSYGGAECQGHWVETRDCFLQQCPVDGKWQAWASWGSCSVTCGAGSQRRERVCSGPFFGGAACQGPQDEYRQCGTQRCPEPHEICDEDNFGAVIWKETPAGEVAAVRCPRNATGLILRRCELDEEGIAYWEPPTYIRCVSIDYRNIQMMTREHLAKAQRGLPGEGVSEVIQTLVEISQDGTSYSGDLLSTIDVLRNMTEIFRRAYYSPTPGDVQNFVQILSNLLAEENRDKWEEAQLAGPNAKELFRLVEDFVDVIGFRMKDLRDAYQVTDNLVLSIHKLPASGATDISFPMKGWRATGDWAKVPEDRVTVSKSVFSTGLTEADEASVFVVGTVLYRNLGSFLALQRNTTVLNSKVISVTVKPPPRSLRTPLEIEFAHMYNGTTNQTCILWDETDVPSSSAPPQLGPWSWRGCRTVPLDALRTRCLCDRLSTFAILAQLSADANMEKATLPS

SEQ ID NO: 17 - protein, 345 aa, Homo sapiens
MISPVLILFSSFLCHVAIAGRTCPKPDDLPFSTVVPLKTFYEPGEEITYSCKPGYVSRGGMRKFICPLTGLWPINTLKCTPRVCPFAGILENGAVRYTTFEYPNTISFSCNTGFYLNGADSAKCTEEGKWSPELPVCAPIICPPPSIPTFATLRVYKPSAGNNSLYRDTAVFECLPQHAMFGNDTITCTTHGNWTKLPECREVKCPFPSRPDNGFVNYPAKPTLYYKDKATFGCHDGYSLDGPEEIECTKLGNWSAMPSCKASCKVPVKKATVVYQGERVKIQEKFKNGMLHGDKVSFFCKNKEKKCSYTEDAQCIDGTIEVPKCFKEHSSLAFWKTDASDVKPC

SEQ ID NO: 18 - protein, 622 aa, Homo sapiens
MAHVRGLQLPGCLALAALCSLVHSQHVFLAPQQARSLLQRVRRANTFLEEVRKGNLERECVEETCSYEEAFEALESSTATDVFWAKYTACETARTPRDKLAACLEGNCAEGLGTNYRGHVNITRSGIECQLWRSRYPHKPEINSTTHPGADLQENFCRNPDSSTTGPWCYTTDPTVRRQECSIPVCGQDQVTVAMTPRSEGSSVNLSPPLEQCVPDRGQQYQGRLAVTTHGLPCLAWASAQAKALSKHQDFNSAVQLVENFCRNPDGDEEGVWCYVAGKPGDFGYCDLNYCEEAVEEETGDGLDEDSDRAIEGRTATSEYQTFFNPRTFGSGEADCGLRPLFEKKSLEDKTERELLESYIDGRIVEGSDAEIGMSPWQVMLFRKSPQELLCGASLISDRWVLTAAHCLLYPPWDKNFTENDLLVRIGKHSRTRYERNIEKISMLEKIYIHPRYNWRENLDRDIALMKLKKPVAFSDYIHPVCLPDRETAASLLQAGYKGRVTGWGNLKETWTANVGKGQPSVLQVVNLPIVERPVCKDSTRIRITDNMFCAGYKPDEGKRGDACEGDSGGPFVMKSPFNNRWYQMGIVSWGEGCDRDGKYGFYTHVFRLKKWIQKVIDQFGE

SEQ ID NO: 19 - protein, 466 aa, Homo sapiens
MVSQALRLLCLLLGLQGCLAAGGVAKASGGETRDMPWKPGPHRVFVTQEEAHGVLHRRRRANAFLEELRPGSLERECKEEQCSFEEAREIFKDAERTKLFWISYSDGDQCASSPCQNGGSCKDQLQSYICFCLPAFEGRNCETHKDDQLICVNENGGCEQYCSDHTGTKRSCRCHEGYSLLADGVSCTPTVEYPCGKIPILEKRNASKPQGRIVGGKVCPKGECPWQVLLLVNGAQLCGGTLINTIWVVSAAHCFDKIKNWRNLIAVLGEHDLSEHDGDEQSRRVAQVIIPSTYVPGTTNHDIALLRLHQPVVLTDHVVPLCLPERTFSERTLAFVRFSLVSGWGQLLDRGATALELMVLNVPRLMTQDCLQQSRKVGDSPNITEYMFCAGYSDGSKDSCKGDSGGPHATHYRGTWYLTGIVSWGQGCATVGHFGVYTRVSQYIEWLQKLMRSEPRPGVLLRAPFP

SEQ ID NO: 20 - protein, 461 aa, Homo sapiens
MQRVNMIMAESPGLITICLLGYLLSAECTVFLDHENANKILNRPKRYNSGKLEEFVQGNLERECMEEKCSFEEAREVFENTERTTEFWKQYVDGDQCESNPCLNGGSCKDDINSYECWCPFGFEGKNCELDVTCNIKNGRCEQFCKNSADNKVVCSCTEGYRLAENQKSCEPAVPFPCGRVSVSQTSKLTRAETVFPDVDYVNSTEAETILDNITQSTQSFNDFTRVVGGEDAKPGQFPWQVVLNGKVDAFCGGSIVNEKWIVTAAHCVETGVKITVVAGEHNIEETEHTEQKRNVIRIIPHHNYNAAINKYNHDIALLELDEPLVLNSYVTPICIADKEYTNIFLKFGSGYVSGWGRVFHKGRSALVLQYLRVPLVDRATCLRSTKFTIYNNMFCAGFHEGGRDSCQGDSGGPHVTEVEGTSFLTGIISWGEECAMKGKYGIYTKVSRYVNWIKEKTKLT

SEQ ID NO: 21 - protein, 488 aa, Homo sapiens
MGRPLHLVLLSASLAGLLLLGESLFIRREQANNILARVTRANSFLEEMKKGHLERECMEETCSYEEAREVFEDSDKTNEFWNKYKDGDQCETSPCQNQGKCKDGLGEYTCTCLEGFEGKNCELFTRKLCSLDNGDCDQFCHEEQNSVVCSCARGYTLADNGKACIPTGPYPCGKQTLERRKRSVAQATSSSGEAPDSITWKPYDAADLDPTENPFDLLDFNQTQPERGDNNLTRIVGGQECKDGECPWQALLINEENEGFCGGTILSEFYILTAAHCLYQAKRFKVRVGDRNTEQEEGGEAVHEVEVVIKHNRFTKETYDFDIAVLRLKTPITFRMNVAPACLPERDWAESTLMTQKTGIVSGFGRTHEKGRQSTRLKMLEVPYVDRNSCKLSSSFIITQNMFCAGYDTKQEDACQGDSGGPHVTRFKDTYFVTGIVSWGEGCARKGKYGIYTKVTAFLKWIDRSMKTRGLPKAKSHAPEVITSSPLK

SEQ ID NO: 22 - protein, 678 aa, Homo sapiens
MAPSLSPGPAALRRAPQLLLLLLAAECALAALLPAREATQFLRPRQRRAFQVFEEAKQGHLERECVEELCSREEAREVFENDPETDYFYPRYLDCINKYGSPYTKNSGFATCVQNLPDQCTPNPCDRKGTQACQDLMGNFFCLCKAGWGGRLCDKDVNECSQENGGCLQICHNKPGSFHCSCHSGFELSSDGRTCQDIDECADSEACGEARCKNLPGSYSCLCDEGFAYSSQEKACRDVDECLQGRCEQVCVNSPGSYTCHCDGRGGLKLSQDMDTCEDILPCVPFSVAKSVKSLYLGRMFSGTPVIRLRFKRLQPTRLVAEFDFRTFDPEGILLFAGGHQDSTWIVLALRAGRLELQLRYNGVGRVTSSGPVINHGMWQTISVEELARNLVIKVNRDAVMKIAVAGDLFQPERGLYHLNLTVGGIPFHEKDLVQPINPRLDGCMRSWNWLNGEDTTIQETVKVNTRMQCFSVTERGSFYPGSGFAFYSLDYMRTPLDVGTESTWEVEVVAHIRPAADTGVLFALWAPDLRAVPLSVALVDYHSTKKLKKQLVVLAVEHTALALMEIKVCDGQEHVVTVSLRDGEATLEVDGTRGQSEVSAAQLQERLAVLERHLRSPVLTFAGGLPDVPVTSAPVTAFYRGCMTLEVNRRLLDLDEAAYKHSDITAHSCPPVEPAAA

SEQ ID NO: 23 - protein, 387 aa, Homo sapiens
MPRPRLLAALCGALLCAPSLLVALDICSKNPCHNGGLCEEISQEVRGDVFPSYTCTCLKGYAGNHCETKCVEPLGLENGNIANSQIAASSVRVTFLGLQHWVPELARLNRAGMVNAWTPSSNDDNPWIQVNLLRRMWVTGVVTQGASRLASHEYLKAFKVAYSLNGHEFDFIHDVNKKHKEFVGNWNKNAVHVNLFETPVEAQYVRLYPTSCHTACTLRFELLGCELNGCANPLGLKNNSIPDKQITASSSYKTWGLHLFSWNPSYARLDKQGNFNAWVAGSYGNDQWLQVDLGSSKEVTGIITQGARNFGSVQFVASYKVAYSNDSANWTEYQDPRTGSSKIFPGNWDNHSHKKNLFETPILARYVRILPVAWHNRIALRLELLGC

SEQ ID NO: 24 - protein, 404 aa, Homo sapiens
MAAGTAVGAWVLVLSLWGAVVGAQNITARIGEPLVLKCKGAPKKPPQRLEWKLNTGRTEAWKVLSPQGGGPWDSVARVLPNGSLFLPAVGIQDEGIFRCQAMNRNGKETKSNYRVRVYQIPGKPEIVDSASELTAGVPNKVGTCVSEGSYPAGTLSWHLDGKPLVPNEKGVSVKEQTRRHPETGLFTLQSELMVTPARGGDPRPTFSCSFSPGLPRHRALRTAPIQPRVWEPVPLEEVQLVVEPEGGAVAPGGTVTLTCEVPAQPSPQIHWMKDGVPLPLPPSPVLILPEIGPQDQGTYSCVATHSSHGPQESRAVSISIIEPGEEGPTAGSVGGSGLGTLALALGILGGLGTAALLIGVILWQRRQRRGEERKAPENQEEEEERAELNQSEEPEAGESSTGGP

SEQ ID NO: 25 - protein, 320 aa, Homo sapiens
AQNITARIGEPLVLKCKGAPKKPPQRLEWKLNTGRTEAWKVLSPQGGGPWDSVARVLPNGSLFLPAVGIQDEGIFRCQAMNRNGKETKSNYRVRVYQIPGKPEIVDSASELTAGVPNKVGTCVSEGSYPAGTLSWHLDGKPLVPNEKGVSVKEQTRRHPETGLFTLQSELMVTPARGGDPRPTFSCSFSPGLPRHRALRTAPIQPRVWEPVPLEEVQLVVEPEGGAVAPGGTVTLTCEVPAQPSPQIHWMKDGVPLPLPPSPVLILPEIGPQDQGTYSCVATHSSHGPQESRAVSISIIEPGEEGPTAGSVGGSGLGTLA

SEQ ID NO: 26 - protein, 556 aa, Homo sapiens
CSPLPCNEDGYMSCKDGKASFTCTCKPGWQGEKCEFDINECKDPSNINGGCSQICDNTPGSYHCSCKNGFVMLSNKKDCKDVDECSLKPSICGTAVCKNIPGDFECECPEGYRYNLKSKSCEDIDECSENMCAQLCVNYPGGYTCYCDGKKGFKLAQDQKSCEVVSVCLPLNLDTKYELLYLAEQFAGVVLYLKFRLPEISRFSAEFDFRTYDSEGVILYAESIDHSAWLLIALRGGKIEVQLKNEHTSKITTGGDVINNGLWNMVSVEELEHSISIKIAKEAVMDINKPGPLFKPENGLLETKVYFAGFPRKVESELIKPINPRLDGCIRSWNLMKQGASGIKEIIQEKQNKHCLVTVEKGSYYPGSGIAQFHIDYNNVSSAEGWHVNVTLNIRPSTGTGVMLALVSGNNTVPFAVSLVDSTSEKSQDILLSVENTVIYRIQALSLCSDQQSHLEFRVNRNNLELSTPLKIETISHEDLQRQLAVLDKAMKAKVATYLGGLPDVPFSATPVNAFYNGCMEVNINGVQLDLDEAISKHNDIRAHSCPSVWKKTKNS

SEQ ID NO: 27 - protein, 2570 aa, Homo sapiens
MAGPRGLLPLCLLAFCLAGFSFVRGQVLFKGCDVKTTFVTHVPCTSCAAIKKQTCPSGWLRELPDQITQDCRYEVQLGGSMVSMSGCRRKCRKQVVQKACCPGYWGSRCHECPGGAETPCNGHGTCLDGMDRNGTCVCQENFRGSACQECQDPNRFGPDCQSVCSCVHGVCNHGPRGDGSCLCFAGYTGPHCDQELPVCQELRCPQNTQCSAEAPSCRCLPGYTQQGSECRAPNPCWPSPCSLLAQCSVSPKGQAQCHCPENYHGDGMVCLPKDPCTDNLGGCPSNSTLCVYQKPGQAFCTCRPGLVSINSNASAGCFAFCSPFSCDRSATCQVTADGKTSCVCRESEVGDGRACYGHLLHEVQKATQTGRVFLQLRVAVAMMDQGCREILTTAGPFTVLVPSVSSFSSRTMNASLAQQLCRQHIIAGQHILEDTRTQQTRRWWTLAGQEITVTFNQFTKYSYKYKDQPQQTFNIYKANNIAANGVFHVVTGLRWQAPSGTPGDPKRTIGQILASTEAFSRFETILENCGLPSILDGPGPFTVFAPSNEAVDSLRDGRLIYLFTAGLSKLQELVRYHIYNHGQLTVEKLISKGRILTMANQVLAVNISEEGRILLGPEGVPLQRVDVMAANGVIHMLDGILLPPTILPILPKHCSEEQHKIVAGSCVDCQALNTSTCPPNSVKLDIFPKECVYIHDPTGLNVLKKGCASYCNQTIMEQGCCKGFFGPDCTQCPGGFSNPCYGKGNCSDGIQGNGACLCFPDYKGIACHICSNPNKHGEQCQEDCGCVHGLCDNRPGSGGVCQQGTCAPGFSGRFCNESMGDCGPTGLAQHCHLHARCVSQEGVARCRCLDGFEGDGFSCTPSNPCSHPDRGGCSENAECVPGSLGTHHCTCHKGWSGDGRVCVAIDECELDMRGGCHTDALCSYVGPGQSRCTCKLGFAGDGYQCSPIDPCRAGNGGCHGLATCRAVGGGQRVCTCPPGFGGDGFSCYGDIFRELEANAHFSIFYQWLKSAGITLPADRRVTALVPSEAAVRQLSPEDRAFWLQPRTLPNLVRAHFLQGALFEEELARLGGQEVATLNPTTRWEIRNISGRVWVQNASVDVADLLATNGVLHILSQVLLPPRGDVPGGQGLLQQLDLVPAFSLFRELLQHHGLVPQIEAATAYTIFVPTNRSLEAQGNSSHLDADTVRHHVVLGEALSMETLRKGGHRNSLLGPAHWIVFYNHSGQPEVNHVPLEGPMLEAPGRSLIGLSGVLTVGSSRCLHSHAEALREKCVNCTRRFRCTQGFQLQDTPRKSCVYRSGFSFSRGCSYTCAKKIQVPDCCPGFFGTLCEPCPGGLGGVCSGHGQCQDRFLGSGECHCHEGFHGTACEVCELGRYGPNCTGVCDCAHGLCQEGLQGDGSCVCNVGWQGLRCDQKITSPQCPRKCDPNANCVQDSAGASTCACAAGYSGNGIFCSEVDPCAHGHGGCSPHANCTKVAPGQRTCTCQDGYMGDGELCQEINSCLIHHGGCHIHAECIPTGPQQVSCSCREGYSGDGIRTCELLDPCSKNNGGCSPYATCKSTGDGQRTCTCDTAHTVGDGLTCRARVGLELLRDKHASFFSLRLLEYKELKGDGPFTIFVPHADLMSNLSQDELARIRAHRQLVFRYHVVGCRRLRSEDLLEQGYATALSGHPLRFSEREGSIYLNDFARVVSSDHEAVNGILHFIDRVLLPPEALHWEPDDAPIPRRNVTAAAQGFGYKIFSGLLKVAGLLPLLREASHRPFTMLWPTDAAFRALPPDRQAWLYHEDHRDKLAAILRGHMIRNVEALASDLPNLGPLRTMHGTPISFSCSRTRAGELMVGEDDARIVQRHLPFEGGLAYGIDQLLEPPGLGARCDHFETRPLRLNTCSICGLEPPCPEGSQEQGSPEACWRFYPKFWTSPPLHSLGLRSVWVHPSLWGRPQGLGRGCHRNCVTTTWKPSCCPGHYGSECQACPGGPSSPCSDRGVCMDGMSGSGQCLCRSGFAGTACELCAPGAFGPHCQACRCTVHGRCDEGLGGSGSCFCDEGWTGPRCEVQLELQPVCTPPCAPEAVCRAGNSCECSLGYEGDGRVCTVADLCQDGHGGCSEHANCSQVGTMVTCTCLPDYEGDGWSCRARNPCTDGHRGGCSEHANCLSTGLNTRRCECHAGYVGDGLQCLEESEPPVDRCLGQPPPCHSDAMCTDLHFQEKRAGVFHLQATSGPYGLNFSEAEAACEAQGAVLASFPQLSAAQQLGFHLCLMGWLANGSTAHPVVFPVADCGNGRVGIVSLGARKNLSERWDAYCFRVQDVACRCRNGFVGDGISTCNGKLLDVLAATANFSTFYGMLLGYANATQRGLDFLDFLDDELTYKTLFVPVNEGFVDNMTLSGPDLELHASNATLLSANASQGKLLPAHSGLSLIISDAGPDNSSWAPVAPGTVVVSRIIVWDIMAFNGIIHALASPLLAPPQPQAVLAPEAPPVAAGVGAVLAAGALLGLVAGALYLRARGKPMGFGFSAFQAEDDADDDFSPWQEGTNPTLVSVPNPVFGSDTFCEPFDDSLLEEDFPDTQRILTVK

SEQ ID NO: 28 - protein, 2453 aa, Homo sapiens
QVLFKGCDVKTTFVTHVPCTSCAAIKKQTCPSGWLRELPDQITQDCRYEVQLGGSMVSMSGCRRKCRKQVVQKACCPGYWGSRCHECPGGAETPCNGHGTCLDGMDRNGTCVCQENFRGSACQECQDPNRFGPDCQSVCSCVHGVCNHGPRGDGSCLCFAGYTGPHCDQELPVCQELRCPQNTQCSAEAPSCRCLPGYTQQGSECRAPNPCWPSPCSLLAQCSVSPKGQAQCHCPENYHGDGMVCLPKDPCTDNLGGCPSNSTLCVYQKPGQAFCTCRPGLVSINSNASAGCFAFCSPFSCDRSATCQVTADGKTSCVCRESEVGDGRACYGHLLHEVQKATQTGRVFLQLRVAVAMMDQGCREILTTAGPFTVLVPSVSSFSSRTMNASLAQQLCRQHIIAGQHILEDTRTQQTRRWWTLAGQEITVTFNQFTKYSYKYKDQPQQTFNIYKANNIAANGVFHVVTGLRWQAPSGTPGDPKRTIGQILASTEAFSRFETILENCGLPSILDGPGPFTVFAPSNEAVDSLRDGRLIYLFTAGLSKLQELVRYHIYNHGQLTVEKLISKGRILTMANQVLAVNISEEGRILLGPEGVPLQRVDVMAANGVIHMLDGILLPPTILPILPKHCSEEQHKIVAGSCVDCQALNTSTCPPNSVKLDIFPKECVYIHDPTGLNVLKKGCASYCNQTIMEQGCCKGFFGPDCTQCPGGFSNPCYGKGNCSDGIQGNGACLCFPDYKGIACHICSNPNKHGEQCQEDCGCVHGLCDNRPGSGGVCQQGTCAPGFSGRFCNESMGDCGPTGLAQHCHLHARCVSQEGVARCRCLDGFEGDGFSCTPSNPCSHPDRGGCSENAECVPGSLGTHHCTCHKGWSGDGRVCVAIDECELDMRGGCHTDALCSYVGPGQSRCTCKLGFAGDGYQCSPIDPCRAGNGGCHGLATCRAVGGGQRVCTCPPGFGGDGFSCYGDIFRELEANAHFSIFYQWLKSAGITLPADRRVTALVPSEAAVRQLSPEDRAFWLQPRTLPNLVRAHFLQGALFEEELARLGGQEVATLNPTTRWEIRNISGRVWVQNASVDVADLLATNGVLHILSQVLLPPRGDVPGGQGLLQQLDLVPAFSLFRELLQHHGLVPQIEAATAYTIFVPTNRSLEAQGNSSHLDADTVRHHVVLGEALSMETLRKGGHRNSLLGPAHWIVFYNHSGQPEVNHVPLEGPMLEAPGRSLIGLSGVLTVGSSRCLHSHAEALREKCVNCTRRFRCTQGFQLQDTPRKSCVYRSGFSFSRGCSYTCAKKIQVPDCCPGFFGTLCEPCPGGLGGVCSGHGQCQDRFLGSGECHCHEGFHGTACEVCELGRYGPNCTGVCDCAHGLCQEGLQGDGSCVCNVGWQGLRCDQKITSPQCPRKCDPNANCVQDSAGASTCACAAGYSGNGIFCSEVDPCAHGHGGCSPHANCTKVAPGQRTCTCQDGYMGDGELCQEINSCLIHHGGCHIHAECIPTGPQQVSCSCREGYSGDGIRTCELLDPCSKNNGGCSPYATCKSTGDGQRTCTCDTAHTVGDGLTCRARVGLELLRDKHASFFSLRLLEYKELKGDGPFTIFVPHADLMSNLSQDELARIRAHRQLVFRYHVVGCRRLRSEDLLEQGYATALSGHPLRFSEREGSIYLNDFARVVSSDHEAVNGILHFIDRVLLPPEALHWEPDDAPIPRRNVTAAAQGFGYKIFSGLLKVAGLLPLLREASHRPFTMLWPTDAAFRALPPDRQAWLYHEDHRDKLAAILRGHMIRNVEALASDLPNLGPLRTMHGTPISFSCSRTRAGELMVGEDDARIVQRHLPFEGGLAYGIDQLLEPPGLGARCDHFETRPLRLNTCSICGLEPPCPEGSQEQGSPEACWRFYPKFWTSPPLHSLGLRSVWVHPSLWGRPQGLGRGCHRNCVTTTWKPSCCPGHYGSECQACPGGPSSPCSDRGVCMDGMSGSGQCLCRSGFAGTACELCAPGAFGPHCQACRCTVHGRCDEGLGGSGSCFCDEGWTGPRCEVQLELQPVCTPPCAPEAVCRAGNSCECSLGYEGDGRVCTVADLCQDGHGGCSEHANCSQVGTMVTCTCLPDYEGDGWSCRARNPCTDGHRGGCSEHANCLSTGLNTRRCECHAGYVGDGLQCLEESEPPVDRCLGQPPPCHSDAMCTDLHFQEKRAGVFHLQATSGPYGLNFSEAEAACEAQGAVLASFPQLSAAQQLGFHLCLMGWLANGSTAHPVVFPVADCGNGRVGIVSLGARKNLSERWDAYCFRVQDVACRCRNGFVGDGISTCNGKLLDVLAATANFSTFYGMLLGYANATQRGLDFLDFLDDELTYKTLFVPVNEGFVDNMTLSGPDLELHASNATLLSANASQGKLLPAHSGLSLIISDAGPDNSSWAPVAPGTVVVSRIIVWDIMAFNGIIHALASPLLAPPQPQAVLAPEAPPVAA

SEQ ID NO: 29 - protein, 2551 aa, Homo sapiens
MMLQHLVIFCLGLVVQNFCSPAETTGQARRCDRKSLLTIRTECRSCALNLGVKCPDGYTMITSGSVGVRDCRYTFEVRTYSLSLPGCRHICRKDYLQPRCCPGRWGPDCIECPGGAGSPCNGRGSCAEGMEGNGTCSCQEGFGGTACETCADDNLFGPSCSSVCNCVHGVCNSGLDGDGTCECYSAYTGPKCDKPIPECAALLCPENSRCSPSTEDENKLECKCLPNYRGDGKYCDPINPCLRKICHPHAHCTYLGPNRHSCTCQEGYRGDGQVCLPVDPCQINFGNCPTKSTVCKYDGPGQSHCECKEHYQNFVPGVGCSMTDICKSDNPCHRNANCTTVAPGRTECICQKGYVGDGLTCYGNIMERLRELNTEPRGKWQGRLTSFISLLDKAYAWPLSKLGPFTVLLPTDKGLKGFNVNELLVDNKAAQYFVKLHIIAGQMNIEYMNNTDMFYTLTGKSGEIFNSDKDNQIKLKLHGGKKKVKIIQGDIIASNGLLHILDRAMDKLEPTFESNNEQTIMTMLQPRYSKFRSLLEETNLGHALDEDGVGGPYTIFVPNNEALNNMKDGTLDYLLSPEGSRKLLELVRYHIVPFTQLEVATLISTPHIRSMANQLIQFNTTDNGQILANDVAMEEIEITAKNGRIYTLTGVLIPPSIVPILPHRCDETKREMKLGTCVSCSLVYWSRCPANSEPTALFTHRCVYSGRFGSLKSGCARYCNATVKIPKCCKGFYGPDCNQCPGGFSNPCSGNGQCADSLGGNGTCICEEGFQGSQCQFCSDPNKYGPRCNKKCLCVHGTCNNRIDSDGACLTGTCRDGSAGRLCDKQTSACGPYVQFCHIHATCEYSNGTASCICKAGYEGDGTLCSEMDPCTGLTPGGCSRNAECIKTGTGTHTCVCQQGWTGNGRDCSEINNCLLPSAGGCHDNASCLYVGPGQNECECKKGFRGNGIDCEPITSCLEQTGKCHPLASCQSTSSGVWSCVCQEGYEGDGFLCYGNAAVELSFLSEAAIFNRWINNASLQPTLSATSNLTVLVPSQQATEDMDQDEKSFWLSQSNIPALIKYHMLLGTYRVADLQTLSSSDMLATSLQGNFLHLAKVDGNITIEGASIVDGDNAATNGVIHIINKVLVPQRRLTGSLPNLLMRLEQMPDYSIFRGYIIQYNLANAIEAADAYTVFAPNNNAIENYIREKKVLSLEEDVLRYHVVLEEKLLKNDLHNGMHRETMLGFSYFLSFFLHNDQLYVNEAPINYTNVATDKGVIHGLGKVLEIQKNRCDNNDTTIIRGRCRTCSSELTCPFGTKSLGNEKRRCIYTSYFMGRRTLFIGCQPKCVRTVITRECCAGFFGPQCQPCPGNAQNVCFGNGICLDGVNGTGVCECGEGFSGTACETCTEGKYGIHCDQACSCVHGRCNQGPLGDGSCDCDVGWRGVHCDNATTEDNCNGTCHTSANCLTNSDGTASCKCAAGFQGNGTICTAINACEISNGGCSAKADCKRTTPGRRVCTCKAGYTGDGIVCLEINPCLENHGGCDKNAECTQTGPNQAACNCLPAYTGDGKVCTLINVCLTKNGGCSEFAICNHTGQVERTCTCKPNYIGDGFTCRGSIYQELPKNPKTSQYFFQLQEHFVKDLVGPGPFTVFAPLSAAFDEEARVKDWDKYGLMPQVLRYHVVACHQLLLENLKLISNATSLQGEPIVISVSQSTVYINNKAKIISSDIISTNGIVHIIDKLLSPKNLLITPKDNSGRILQNLTTLATNNGYIKFSNLIQDSGLLSVITDPIHTPVTLFWPTDQALHALPAEQQDFLFNQDNKDKLKEYLKFHVIRDAKVLAVDLPTSTAWKTLQGSELSVKCGAGRDIGDLFLNGQTCRIVQRELLFDLGVAYGIDCLLIDPTLGGRCDTFTTFDASGECGSCVNTPSCPRWSKPKGVKQKCLYNLPFKRNLEGCRERCSLVIQIPRCCKGYFGRDCQACPGGPDAPCNNRGVCLDQYSATGECKCNTGFNGTACEMCWPGRFGPDCLPCGCSDHGQCDDGITGSGQCLCETGWTGPSCDTQAVLPAVCTPPCSAHATCKENNTCECNLDYEGDGITCTVVDFCKQDNGGCAKVARCSQKGTKVSCSCQKGYKGDGHSCTEIDPCADGLNGGCHEHATCKMTGPGKHKCECKSHYVGDGLNCEPEQLPIDRCLQDNGQCHADAKCVDLHFQDTTVGVFHLRSPLGQYKLTFDKAREACANEAATMATYNQLSYAQKAKYHLCSAGWLETGRVAYPTAFASQNCGSGVVGIVDYGPRPNKSEMWDVFCYRMKDVNCTCKVGYVGDGFSCSGNLLQVLMSFPSLTNFLTEVLAYSNSSARGRAFLEHLTDLSIRGTLFVPQNSGLGENETLSGRDIEHHLANVSMFFYNDLVNGTTLQTRLGSKLLITASQDPLQPTETRFVDGRAILQWDIFASNGIIHVISRPLKAPPAPVTLTHTGLGAGIFFAIILVTGAVALAAYSYFRINRRTIGFQHFESEEDINVAALGKQQPENISNPLYESTTSAPPEPSYDPFTDSEERQLEGNDPLRTL

SEQ ID NO: 30 - protein, 2453 aa, Homo sapiens; identical to SEQ ID NO: 28

SEQ ID NO: 31 - protein, 364 aa, Homo sapiens
MHPQVVILSLILHLADSVAGSVKVGGEAGPSVTLPCHYSGAVTSMCWNRGSCSLFTCQNGIVWTNGTHVTYRKDTRYKLLGDLSRRDVSLTIENTAVSDSGVYCCRVEHRGWFNDMKITVSLEIVPPKVTTTPIVTTVPTVTTVRTSTTVPTTTTVPMTTVPTTTVPTTMSIPTTTTVLTTMTVSTTTSVPTTTSIPTTTSVPVTTTVSTFVPPMPLPRQNHEPVATSPSSPQPAETHPTTLQGAIRREPTSSPLYSYTTDGNDTVTESSDGLWNNNQTQLFLEHSLLTANTTKGIYAGVCISVLVLLALLGVIIAKKYFFKKEVQQLSVSFSSLQIKALQNAVEKEVQAEDNIYIENSLYATD

SEQ ID NO: 32 - protein, 275 aa, Homo sapiens
SVKVGGEAGPSVTLPCHYSGAVTSMCWNRGSCSLFTCQNGIVWTNGTHVTYRKDTRYKLLGDLSRRDVSLTIENTAVSDSGVYCCRVEHRGWFNDMKITVSLEIVPPKVTTTPIVTTVPTVTTVRTSTTVPTTTTVPMTTVPTTTVPTTMSIPTTTTVLTTMTVSTTTSVPTTTSIPTTTSVPVTTTVSTFVPPMPLPRQNHEPVATSPSSPQPAETHPTTLQGAIRREPTSSPLYSYTTDGNDTVTESSDGLWNNNQTQLFLEHSLLTANTTKG

SEQ ID NO: 33 - protein, 301 aa, Homo sapiens
MFSHLPFDCVLLLLLLLLTRSSEVEYRAEVGQNAYLPCFYTPAAPGNLVPVCWGKGACPVFECGNVVLRTDERDVNYWTSRYWLNGDFRKGDVSLTIENVTLADSGIYCCRIQIPGIMNDEKFNLKLVIKPAKVTPAPTRQRDFTAAFPRMLTTRGHGPAETQTLGSLPDINLTQISTLANELRDSRLANDLRDSGATIRIGIYIGAGICAGLALALIFGALIFKWYSHSKEKIQNLSLISLANLPPSGLANAVAEGIRSEENIYTIEENVYEVEEPNEYYCYVSSRQQPSQPLGCRFAMP

SEQ ID NO: 34 - protein, 181 aa, Homo sapiens
SEVEYRAEVGQNAYLPCFYTPAAPGNLVPVCWGKGACPVFECGNVVLRTDERDVNYWTSRYWLNGDFRKGDVSLTIENVTLADSGIYCCRIQIPGIMNDEKFNLKLVIKPAKVTPAPTRQRDFTAAFPRMLTTRGHGPAETQTLGSLPDINLTQISTLANELRDSRLANDLRDSGATIRIG

SEQ ID NO: 35 - protein, 318 aa, Homo sapiens
YSGCKEALIRTDGMRVTSRKSAKYRLQGTIPRGDVSLTILNPSESDSGVYCCRIEVPGWFNDVKINVRLNLQRASTTTHRTATTTTRRTTTTSPTTTRQMTTTPAALPTTVVTTPDLTTGTPLQMTTIAVFTTANTCLSLTPSTLPEEATGLLTPEPSKEGPILTAESETVLPSDSWSSVESTSADTVLLTSKESKVWDLPSTSHVSMWKTSDSVSSPQPGASDTAVPEQNKTTKTGQMDGIPMSMKNEMPISQLLMIIAPSLGFVLFALFVAFLLRGKLMETYCSQKHTRLDYIGDSKNVLNDVQHGREDEDGLFTL

SEQ ID NO: 36 - protein, 290 aa, Homo sapiens [sequence omitted]

SEQ ID NO: 37 - protein, 672 aa, Homo sapiens
MADVFPGNDSTASQDVANRFARKGALRQKNVHEVKDHKFIARFFKQPTFCSHCTDFIWGFGKQGFQCQVCCFVVHKRCHEFVTFSCPGADKGPDTDDPRSKHKFKIHTYGSPTFCDHCGSLLYGLIHQGMKCDTCDMNVHKQCVINVPSLCGMDHTEKRGRIYLKAEVADEKLHVTVRDAKNLIPMDPNGLSDPYVKLKLIPDPKNESKQKTKTIRSTLNPQWNESFTFKLKPSDKDRRLSVEIWDWDRTTRNDFMGSLSFGVSELMKMPASGWYKLLNQEEGEYYNVPIPEGDEEGNMELRQKFEKAKLGPAGNKVISPSEDRKQPSNNLDRVKLTDFNFLMVLGKGSFGKVMLADRKGTEELYAIKILKKDVVIQDDDVECTMVEKRVLALLDKPPFLTQLHSCFQTVDRLYFVMEYVNGGDLMYHIQQVGKFKEPQAVFYAAEISIGLFFLHKRGIIYRDLKLDNVMLDSEGHIKIADFGMCKEHMMDGVTTRTFCGTPDYIAPEIIAYQPYGKSVDWWAYGVLLYEMLAGQPPFDGEDEDELFQSIMEHNVSYPKSLSKEAVSVCKGLMTKHPAKRLGCGPEGERDVREHAFFRRIDWEKLENREIQPPFKPKVCGKGAENFDKFFTRGQPVLTPPDQLVIANIDQSDFEGFSYVNPQFVHPILQSAV

SEQ ID NO: 38 - protein, 118 aa, Homo sapiens
KRGRIYLKAEVADEKLHVTVRDAKNLIPMDPNGLSDPYVKLKLIPDPKNESKQKTKTIRSTLNPQWNESFTFKLKPSDKDRRLSVEIWDWDRTTRNDFMGSLSFGVSELMKMPASGWY

SEQ ID NO: 39 - protein, 362 aa, Homo sapiens
LIAIAIVAVLLVLTCCFCICKKCLFKKKNKKKGKEKGGKNAINMKDVKDLGKTMKDQALKDDDAETGLTDGEEKEEPKEEEKLGKLQYSLDYDFQNNQLLVGIIQAAELPALDMGGTSDPYVKVFLLPDKKKKFETKVHRKTLNPVFNEQFTFKVPYSELGGKTLVMAVYDFDRFSKHDIIGEFKVPMNTVDFGHVTEEWRDLQSAEKEEQEKLGDICFSLRYVPTAGKLTVVILEAKNLKKMDVGGLSDPYVKIHLMQNGKRLKKKKTTIKKNTLNPYYNESFSFEVPFEQIQKVQVVVTVLDYDKIGKNDAIGKVFVGYNSTGAELRHWSDMLANPRRPIAQWHTLQVEEEVDAMLAVKK

SEQ ID NO: 40 - protein, 120 aa, Homo sapiens
KLGKLQYSLDYDFQNNQLLVGIIQAAELPALDMGGTSDPYVKVFLLPDKKKKFETKVHRKTLNPVFNEQFTFKVPYSELGGKTLVMAVYDFDRFSKHDIIGEFKVPMNTVDFGHVTEEWR

SEQ ID NO: 41 - protein, 403 aa, Homo sapiens
MNHKSKKRIREAKRSARPELKDSLDWTRHNYYESFSLSPAAVADNVERADALQLSVEEFVERYERPYKPVVLLNAQEGWSAQEKWTLERLKRKYRNQKFKCGEDNDGYSVKMKMKYYIEYMESTRDDSPLYIFDSSYGEHPKRRKLLEDYKVPKFFTDDLFQYAGEKRRPPYRWFVMGPPRSGTGIHIDPLGTSAWNALVQGHKRWCLFPTSTPRELIKVTRDEGGNQQDEAITWFNVIYPRTQLPTWPPEFKPLEILQKPGETVFVPGGWWHVVLNLDTTIAITQNFASSTNFPVVWHKTVRGRPKLSRKWYRILKQEHPELAVLADSVDLQESTGIASDSSSDSSSSSSSSSSDSDSECESGSEGDGTVHRRKKRRTCSMVGNGDTTSQDDCVSKERSSSR

SEQ ID NO: 42 - DNA, 18529 bp, Homo sapiens
  source 1..18529: mol_type = genomic DNA
agtgtgaaatcttcagagaagaatttctctttagttctttgcaagaaggtagagataaaggtaagtcttggttttccttttagttagttttggttgttttgaaaacttttctcatcactatgttaaatgttactgcttctacaggatttatggttagttgcatttaacatgataagtcattcataaatctttctgtagaattacattggatatttatattttaggaatcacaaattacaatatttttgttctacttagttaacaaatacaagtaaaaataagataagtttgcttaatactggctcattgtactcttggtaagttaccatgagaaagaagggaagaatgtgctttccctctggtagccttaaaagaatgtgtttttcctttccttccccttgaaatatttcttcccaagagctgtgtgttttacagagaaatcgtgatgggggctgctttttgggggcaagaacaaaagtgataggagtgggctgcagggaactgtttcaaaatagtaggactttcataatttattttcttcttttgtaaggaaaacaagatagattcagacctcaaagtgctaatcatgctctttgtaataaacatttaaaaatatatgttatatttgcttatgctatttaaaataagaaggtccgcttattacttttttcatttaaagagggtgtggccacattccttttcttgtaggctctgtgtcatatacagtcttttcaagtgctggctggaaaacctaaaaagaagggaaatactttctgggtagtgtcagatacattatcctaggggaatgtcagtgaggccctccaacagctattccacttgattgttgcatgagctaatggccataaaactccttagaaaagcacaaagcaaaactaaagaagagtatttactagtgttggatatatttgtaaaagtgagattacaaatcatgtatctggctatttttttcttaaacatgttccttcaagaatttttctgttcgttcattttaaatatttattaaatgttctgatttcttatgttcactgctagctaattaacaaggatggaatttttcttgccttggttatatctaaaagattgtaaaaactttgagaaagcaatgttgccctctttccacaggagtattttggtagctgtaagagaatgcacattgcaaatgactcaaatgtggtaaaatgttggtttcataattctgaaatggcctcttccccaaaagtgacagtaacaccctagctccaggctcaaccacatccagcacatagccaacatttaacagatgttgacaaaatagttaataataatattattaaggaaccagccagagtttcatgcttattaaatactttttcaaccagaaggtctgcaaaggttgatttctgaatatgacgttagctctctctagacctattaatttacgacatttcaaatcagaggtaaaccagcagacctattatttttcaatgataaactataaacagttttttgaagtcaactatttccttttcctttaaaattggacagaatttcatcaggaagctcagaacaatccaatttatataatgccttccttcattatgctaattttcttcatcttcatctacttgaagtaatatttaagattggcacttcagagctgtaaatggatcttagatgataattacttcaacattcttattttataaacgaagaccctctggagaagctaaatgtttttcttgaggtcagatcgccagataatcaagaaccagtatacttcaatttgtattttatatcctatagttgtgggtagaaaatgttcattaaattagtgtagatatgttttttaaaatattagcaatgatacatgatattcattcaataatacttattaacatcctaaattccaggcattttgctagggattggaagtacatacataatgaatattattatttgtatgttagcacgggcctcatggcctgctcctggggaatataaacaagccaatggaaagtgataatacagaaaggtggggctggtgtaggggtgaagtcaggatgctttgggagagcatggaaggtcaccgaatccagtgctgaggaactaatgaagggtttctgaagaacgtgatgagatcaatgctgatgagtcacttagaagtagcaattagttaggcaaagggaagtgaatgtggaggaggaacaagcattccaggcaagaagaacaccctatcgaaaagcctggaagcaaaacattagtgaggctacctttcataaattgctttctgtaagtcatgccattgtgtagtcttaattgctttctctcaccagggaaggtgtgggaaggacttgtgaaatacatattcgaggaaaaactatgcacaaggccgtgcatttaaaaataaactccctaaggctggggtgaaacctgctacggtctgcgcaagttgactgttaatgaatttgattctcaggtgtgagtgattaaaagaacactgatcatgtcattttctttttggtcactaattccctccctcccttctctttcttttcttttttcttttcttttctttttctttctttcttcccgacagagtcttgttatgtcgcccaggatggagtgtagtggtacaatctcggctcactgcagcctccgcctcttcctgggttcaagtgattctcctgcctcagccttctgagtagatgggactacaggtgcacaccaccatgcctggctgatttttgtacttttggtagagacggggtttcgccatgctggccaggctggtcttgaactcctggcctcaagtaatctgcccaccttggcctcctaaattgctgggattgcaggtgtgagccaccatgcacagccaaaatatataacactttggaatcaaaagggatggatttatgtctccattcttgccactactagcaggaagactgcttgaaaatagcactcagttttcccagatagaaactgaggataatgattaaaggctattattccaagcaagggttagtcattgctgttactatcattgcaaaactctgatagttctagattgtaaccaggaagatacaatcaaccacaaaactcagcttcctctgtcacaaattctagatagaggtagcctttcatgaggctgagagatggaaaaatgaagcggggggactctcttaggacacataaatatgcaaaaaaattgctacgctttagaaagctatacattcaaatcatagataagctgacattagtaggcagtgcatgttcacaaaaagaccattaattagaagaaatgtgaaatattgttaatttccttatagatttgcctatgtataaatggccaatttcaccgtcaatgagctcatgctaagtactgaaataaacttagttttagagcttatctttggttagttgaaatctgtattgagttagttgaaatctataagttgatagaacaggctctttaaaatctattgcaagctttatacactacaaacaaaaagatagaaaaaagaaaacctttcatgaactcattggcttaggcaggttttcatgcagagtgtaggtattgaagagtcagaacggcttaaggatagaatttggccaatatataaaaaaatatatatttggtatttgttagttgtattataattattcagaagttcagttaatacgtgcagttggctttgagcccttaaccagctgtatgtgataaaatctgtttcctttagagcaatttcttatatcctgccttgatgctcctgtctttaatctttgctaagagctggtggtgaatttggctgaattcagattccgtttttctctaattgatttcttgaagaaaattctctattggttgcttttctttcctagattatgcttttagtctatccaaatacttcaggctagaatgtaggaacttagaagatacaaatcacaaagctgtctcctctagggatgctctctctttcaaataagtgacttaaacaacttatttttgttatcttgtgttatgtaattaatataccttttcctgggctttctctggctttttttttaaatggacattattcaagtattttttagaagtaaaaaaaaaacagtacagtaaagtttttataacgtttattttgaagttgtcagagacacctttaatattagactggacaatatctttagtctttcttttgctttcttttgaagtttttatttgctaattgaaaagaatggaataataataataataataataaataaataataataataaataatataaataaataaataaataaataaaataaataaataataaaaacatgtttttataagtgatggagtagtactttgccaagtgatgaattttaacactcattttgatgattcttccttatcaaagccttggatgaaatgatgaaaatggaaattttgagtgcctgaagctgctagaattgcttttaaagtattgggtgtgccaattaagaaggtggaatatgaaactccatgtggcaaccgcaattgcatgaaactagactgtaatgggaactaaaaccttgtgcaaaattgcgggttgttactttatcaggaagcaattttaagtctatcaattatatttaggaaacaggctgctttaaatgaatggaaaaagtattggttcttctcacagatgacagaatagtaataagagcaatcccatgcgaattaagtggggatgatttctgctttggatattattttcttcatgcattcagtgttattacttgcaactccagttactttttagcaggtgaaaatggaaagagtttgtctgaacatgctgttgaggaatcagtttatggaatcagtttatgcctcatgagtcatttatcttcatatcaagaatttaaaactgccaagattgtcctcccaacctctctcacaaacattcatgagagtagtctctagaggggtgaaacagaatggtgtagatagacagatcagtgtagaccttgagcaaggcctctgaaaaacatccccagactaaaaggatctgtgatggcattttgtgtgtgtgtggccaaaacagagaacacattaattttcaatatacttaagatcttaaaaatatatgtctcattaaataaaaatattgccaagtcatgatagcaattcaagaaatttcctttaagatagagtttgccaaaagaacatgcatgttacaattgcacctctaggcttcctgctacaacaaaaaaatccagtataaaataattcttttctgggttttttgtgttgggtgggaaaatatgtaggactactatttagacagctcaaataggaagaaatgtgaagatagcaattacttcaatgctgagtacttttatatcaagaaatagaaaaggaaactaaattattcagggagaaatatcacctggatatctttttacaattaaaattttaaatctgaattcacttgtacagattggcacaagttattttaccttataaatgtaatcattggctgggagtggtagctcacacctgtaattccagcactttgggaggccgaggcgggcagatcacttggggtcatgagttcaaaatcagcctagccaacatggtgaaaacctgtctctactaaaaatacaaaaattagccgggcgtggtggctggtgcctgtaatcccagctactcaggaggctgaggcaggagaattgcttgaacccaggagacggaggttgcagtgagtcgagatttcaccactgcactccagcctgggcgacagagaaagactccatctcaaaaaaaaaaaaaaaaaaaaaagcaatcattaagcttttcatctagccattacttttgtacaggctctcattaattccacatagatggtctaatggtctactaaatagtattctaatcctccatcttgtctatctcttagccattctccatgataaaggatgaatggtctttcggaaacataaatgaaaccatgctgctttaaaaaaacaaacaaacaaaaagaaacccattaatgttttcccaaagctttgtggacacattgaagcttcttgtttcagcttctgccaacatttctcgctccagcaaactttcttctgcttcccaaatatgacaagcttcttctttaacttttctgccaggttaatcttgactcatttcaagagaggcttgggtcagccagggcctactctaagaagtttctttagcccttatgttttcctatggagagcacacactagctttaagtcctgagggtacttaagatgatatttcaatgtttttgtactcttagtgcttggcatatggtgggtggtctacaaatttagaacaatgtagtgaaccacaaactcctctcttcagcctgtgtgcttacttgtagtagttgtctgatctctaaaatttagaactgaatatgccaagaaagagttcaatttcagagaggagggtatggtttcattttaagtataaaagcttcctttaaaaaaaattacgtcttacattttgttatgctcctaagtgtaattgatcctggaaagtaagcgcaaggctactctctaatgctaactcttatgtatgtaagaggtgaggaaggagaggttgtgtgtggtgcatttgttttgtaaaagcatctaactgttttctttccagacactttttcaaaaatggcaatggtatcagaattcctcaagcaggcctggtttattgaaaatgaagagcaggaatatgttgtaagtagagtgataataaaattatgattacaatattgaaataaaaacgaatataagtaaatggccattaatttatttctctctcattcttagcaaactgtgaagtcatccaaaggtggtcccggatcagcggtgagcccctatcctaccttcaatccatcctcggatgtcgctgccttgcataaggccataatggttaaaggtaacgtgtttcctcaaaacagttccctcctggacatttcagaatggctatttgaatgactgtcaaaaaacagacatgtgcaatggaaagaatctgtttcattttgaagataaaaacatttctttgccaaacgaagatgtaattatttacttaacactgaggaaattgtgttcacatcagtggaatctctattgttacagcagatattactggctcatttctagcagaaattccatgctgaaattaaaagctctgttcacatatagagttgcaactagtatcaaacactgcaacactgagggccaggaaaagttaattgtctcttcctttctcactcgaatgaaatgtcattctcccaagtgcttccttgatatgtagtatagcatcgattttttaggctgatatataatttatatttcttaatttgttaagaagttcttttggagcatctcagtaatgaattattttatgtcaattgatgatgaagaaaattggtgttaaaggctgttggccctttatttccaggtgtggatgaagcaaccatcattgacattctaactaagcgaaacaatgcacagcgtcaacagatcaaagcagcatatctccaggaaacaggaaaggtaagttagagtggtaaatttagatatttaatttcagcatagttatacttaaccatggattcggaagcacagttacctagttctttaaggttctaaccactgttttctcattacatctatgattgggattgcagtgtttatccactttgttgcaatttaatcaattttatcaaatttcctatttttatacattagtcatcttggtgtatattgtttgcagatgtggtgctctggggacaaatttttaatttgaacgtaaacatcgagattgctgctgtcaataaagaatatggtctgattgaaatgtactaatatttaaactgaactgtttaatgcctaaattttatatataattctactttaaaaataagccttatgtcttttataccaaatatgagtagttttctaaagcaatgaaattagaaaactatataatttcagtatctgattatactgcttgttatttgagaagtacaaacctcaaagattggaaacatgaatatattattttaaaagtaattttacttctgttttctgttagcacacagtcctctgtgttttgatctttgtgatttctcccctgtgtataagattactaaccctatgctttaagaagttattgatgaattcagtaaattttattttaatccctctagatctggaagggtaagataatgtttcaaaatatttggtacactttgtatgtgaagggaagaagctctaaaagatggttgggtttagggatgagttgtacgatgacctaaagtcaggtaatatcacattttttaacctagcatgttacttattggaagtcctgattctaatctttttttttgtagcccctggatgaaacactgaagaaagcccttacaggtcaccttgaggaggttgttttagctctgctaaaaactccagcgcaatttgatgctgatgaacttcgtgctgccatgaaggtaaatcgcccaatttgagcaaactcctttcctcaagaggatgtattgggcaagtcacttatgcttatgttattttcaaaatctagtatagtacctgtcaatcagtgggagtttgaagaataaataaattaatacctcaatgaaggaattaatatataaatgaaaacagaaatgttggcactaacaccttccatgtcatgtcactatatgagtcatatatttgcatttttatttttacccaaaatattgatgataaacttgttttgttttagggcaatgtaatagagcttattgtaattattaaatgttgtgggtgaaatttactaaatgacagagtcaaacaaattttggaacaccaaaaactcattgatcctcttgcatgaagatttttttctacatttatccttttcttctcttcaaatttagggccttggaactgatgaagatactctaattgagattttggcatcaagaactaacaaagaaatcagagacattaacagggtctacagagagggtaagttgtaatgtccaacagtccaaacgccttatttgaaaaggaaatctaatatactttcttaaaattgactgtctatggtaattatggcagctttggaatctccacatatcaaaatgtttctttattgtttggcacatgtctattaaatgctgttaccaggcaacgcttgagttgctaggttgctgacaagggagatggtgtcccaatccgcatcaagcttgcgttttaatagaaaatgttcctctaggataaatggccacatacgattataatggaaacctcaattcagagcattgaatttttaaaaatttctgaaaaacacttttctattattctggaatgtattttataaaaatgtcccaaggtcattttttttgaaaagaatatataataacaaaaaaatctcctaacaaaatgtttttcatttgtccttgaaaaagtaaagaattaggtgcttataattctctgttggaaaccttaactttatcgttatgaacataagagactcactttatctctagttaaattcacagaataaaagactagtcttagcttattttatctctccagtgaagcatctcatttaaatgatgtgctcaacactgaaaagagggtaattgcaagtctcttaccattttcctactctcatttccctgagctgctggctttttggctttcccaatgcaatatatggcatatagaagatctttctgcttgattctcataccaagcatggagaatacaatagcttttgcatatcattttcagaggaatttaataaaagaataaaaataaggaagcttttaaacctcattttctgcaattcttatttaattaccaatgtttatgttagatccatgtgtcagtggtaataatgatgattatttttgtttgataaaacatagtttataaaaataagtgtttatatatttttcatatggccaagatataggccagtgatagtttattacattgcccagtttcaagttgttttagtccgtttgtgttgctataaagaaatatctgagaccaagtaatgtaaaaagaaaggaaatactgtacaagtagtatgggaccagcgtctgcttttgatgagggcctcatactacttctactcatggcagaaagcagacagaagcagatgtgtgcagagagggagagagagaaaaggaggtgccaggctcttttcaacagccagttcttaaagaaactatgaatgagaactcactccgagccattcatgagggatctgcccccatcatccaaacatctcccaacaggccccaccttcaacagtggagaataaattgcaacatgagacttggcagggccaaacaaacaatatgaaaaccatagcactagtcaattataaattcaattattttttcctattacagtattattttatgtagttaagcagaagtgtttacacacacataaatcatcaaactgcattacttataagacatttatagtttttaaactaaataaataatttgcattcaagcaagtacctcattttgttcttttaaacaattattttattcattctattgcttaaattctgccatgttgtatttcagaattaattactaatgtatacctatacaatttattcttaacgaaagctttatgactgtgagttttcaatcacagtattatctaaattgctcccattgcttcatatgaaataaattcaatgatccaaaaatttacctgctttaatttttctcttcttatttaaaaatgataatattttgcaacatgttccataagtcattgaacactgtggcactgtgaattttcaaccaacttagagatgtcagatattcttattattattcatcactggtttactataaaatctatttttcttttttctcagaactgaagagagatctggccaaagacataacctcagacacatctggagattttcggaacgctttgctttctcttgctaaggtacaactcagatactttaggaaatgcctcttgttttataaagactaatttcttagtccattttgtgttgctataagggaatatctgaggctaggtaatttttaaagataaaaaggtttatttggctcaggattctgatggctaacaaattcaagtttgggtatctatgtctggtgagagcctcaggctgcttccactcctgacagaagaggaaagggagctggtgtgtgcagagaccacatggcaagaaaggaagcaagagagagaatggggaggtgccagcctcgttaacaaccagctctcgtggttctcatgagcaagaactcattcccagtgacggcattaatctcttcatgagagatcagccccaggacccaaatacctccctctaggccccacctttaacactggggatcaaatttcaacatgaggtttggaggggaagaacatctaaaaccatcgcaagtaaaatcttgtatctgagctccttctagaaatgagtaatagaatacctttttctcaaaaaatattatttatctgagtttaagataattaagtaaatcatgcaattacatgctagagaagagcttacaatagaatgggatttctttcagggtgaccgatctgaggactttggtgtgaatgaagacttggctgattcagatgccagggtaaggaagtgcttacaaaatactgctgcagttcatcttcctaccttaagtggggctaccacatgatcccctgtgaaagcaaatctaagatcttctgagagaccaatggcttcttaatgttcatttcctgaatgaggcatgtctttctgtagcccccacacacaaaaaagtagtctttgtaagttttcaatatctctcattattcgtaaaaccagagagaactgaagaaggacaatacaaatttgatttgtcattcccaagaattgtttgttaaaaaaaactctgacctttcgttgtactaggtataagaaggggaaatgtaatttttttattatgtgcaatggaaagagtaagcatatttaacgttatttttaacagagaactttggaatggtttatagatgtcaatttatattgtcaaaatattactgcaatgatataacaagagtataggataaattataataatatatgctttctaacatattgttttatttagtttcagtgacattgctgattatttatatgccaaaccactggcaacataagaaaaatcatatcattttaaagcctggaatttccatttaaaacaaacaaacaactaatatttgcattatgccttctcatggaacagtattctctagagaattcattacagtgcttcactaaggatagagatttctttgtgcacccccatccacttctgctataccagtacattatcatgtacataataggcactcatgaactttttgttcaacaaatgcatacatatcagatcaatttgcttgaaaaatgcaaaataatttttacatacattgaaggttttatcattttaatagaaattgttcaagcatattaaggaacaagagttagcatttgaataattgcccataataaaaaattcttatttgcttttgacatttctgaatttgctttccattttaagactatcagggttcttaatatatatttatggaggttacatggattagtgtgacccaagagaatgatggtagtcaacatttcaaagttaataaagaccgcttgtgacaatagggcagggattatatttttcatatataaaagaaaaaaatctgtcatttagtaaggttgatctatttgtctaagattatgcagctttgaaattgcagagtcagaatttgaatacagaaattctaacatcaaaatgcaaggtccaggttacggttgaattattgatttataagtaacatttgctgataattactttgaacaacacagagtaaaaaatctttagagatccccttggagttgtcttactatagagcataatcttaaagcaatttagttcagcaaacatttattctgcaaacatatattcagactctagtgtttacaaggcaccttgagagaaactgtggaagatatttgacaaacaaaataaggtccctatctttaaagaacttgcaatcttattgttgactactctgattgtattgggcacaaagcgattgcctatataatctttgacaaggtctaacattattgtgcagatatcatttcagcagatagtgaagtgtttacttttgtgtttcttgacaggccttgtatgaagcaggagaaaggagaaaggggacagacgtaaacgtgttcaataccatccttaccaccagaagctatccacaacttcgcagaggtaacaataaatttctttttctggaatctgtttatggaagatgcaattttcttttttgatgacaaataagagaaagtaaaaacagaaccctttttcaatatcactcctgtatcaaacagatacagtgttcctgacccattgttatttgtcaatttgtccaattttgtacagccgctactttatcatatttaatacattttgtgacttgggcatgtggaacataattttgttattttcactgcttttactcccctaaaagatttggaatatgtgtgggaaaagacatgcataacagaacaaatgaaattagaatgaagaaaaacaaaaaaaaaaaaacaaaaaaccctcagagctaaatgaagaaagaaatatgtaggtgctttggaaaaacaacaacaagacaaaactcagaaaaagtcctggcctttgagtgcaagatttagctctgggcctcttggaagtgaaggcgatggaaaagttatgacaattaccaaagttcaccatcttataatagtatactgatttctactgttaaatgtaagagaaatttagtgcacaggtctttatataagggaagatccatttgctgtggctcttagaactgctgtaggaagtgctatagttgtcaatcacatgccgtttctaataactgtcaacatttgcaaacatttcgccaaaatatataggaataccaaaatggccaggtaagttacattcctaggagaggatgaagtattcacgttatgattaattgggtatattgctttaaaaggtgtagccaaagttgttattctaaaaaattctttgagtcagttgccttgattttgctaaagctttctaaagaaaaggatgttttgcatgtatcttagtttgaatttaatattcagtgtttcagaaatacaccaagtacagtaagcatgacatgaacaaagttctggacctggagttgaaaggtgacattgagaaatgcctcacagctatcggtatgtagtccagcagttgaaagagttttctaactagaaattgtattttcaaagctatcctatacttaacaagaacaacagcaacaaaaccaataaaagaaaacaaaaaacaatcagaagtagtgcatctgtttcaattgaagcaacgtaaaagattggcaaagtactataaccttaataacaatagatattattccccttttcaaaaatagagagagatagactatacttattgagcacctacttatatcaaacaatgtaccaggctgggcacaccacagaggcaattcagaatggtcactgagagcatgggatctggaataaatgtaacatctggataaatgtaacttcaagtcctggtctactgcttgttaattgtacaatcttgggcaggtccaggagagtctgattcagtgggtccgagttggcctctaaaaatcggtactttttaaagatctcccaggttattcagacaaccatcagggttggggaacctatgttctcaagcagtgtttctcattcatgactatgcacttgaatcccctggaaagcttgttaaaatgcagattctgattccccaggtctggggtggagcttagattctgcttttctaacaagctccccattgatgccaatgctgttggtccatagatctcgacaagatgaagaacactatgaactggaatgtgctagtattatttgggttctgttttatatttaagcccatcctatcccagagttttttcttcatttattcatttatttttacttatttgtttgtgcaactcttactttagacacagaggtacatgtgcacgtttgttccatgggtgttctgcactcaggcagtgagcatagtacccaataagtagttttttgaccaatgccccttctctccctgccctctctagtagtctgcagtgtctgttgttcatagggtgttctttttaaatgttcttatagtaacataaataaagtatttacataggcttgaacacctagtggcttctccactcccaaggagaatatatgttggatagcgcaaactactgaagttgctcttgagatgtatttaaggtaataaaaaaattgatcgtcagggaaaagaatattcaaaaccaccatctagagagtcacaaataccttctcagaagttaactgccctatattgggagatgagaggtgaagaatgatgatgagggatagaacactgttggcaaaattctatatttcctgtttctttcatatggatatttcatttttttcatggtaaatacatcaactaaaattttcttctctaacagtgaagtgcgccacaagcaaaccagctttctttgcagagaagcttcatcaagccatgaaagtatgtaccattctacttatatgtcctgcttagaggaagaattatttgtagaaagaacagaaaacctcatgttgtttgaaaatctcacatttaatatcttcccattaatgagaatcattgttctatttgatgaaagaggtaatacactaccttctcagaataaacttctgttagattcggtgcttttttttacagatgagattgtaaagtgagcctgtaagtgatttacggctcacttgtgatttgcttaaaacatgtgtcaccacgggaagggtgatgtactttcttttttaacgtgtaattttagtggcctacttcctctaaggttgtgagttttataatctcccactttatgagtctgatttgttgtttttattattctgtcttttatgccacagattaatagttgaaacttttgaaatgtcattctatgattaaggatgtagaatgatgtatttgagatcaactatgtcactttaactttactgtctgacatgcatggtattatacaaggtacctcttctattctgacattttgagcccacaaatgaatagttatgaagttatcttccttttttctttgcagctccaaaataaggaggttttcagagagagagagaaagaaagatctaactatttgaataatatgaaggaatattttgaatatatatgaataatttgaataatatgaaatgatagacatgctaggtactgctctgtagtggttagcatagttgctgccccctttctgccatagtctagtgtgatatttcgttgggtaatgatgaatacctggtgccatggaagagaaaagtgggacatatactccagactttggaaatccaggtagcattgctgtcagctaaattaacacctgaagtttaaatagaaatgagccagatgagggcaagagtggaagagatggggataaagcaagggtggtccaagaggaagaagtaacccacacacaggcttgaaggcaaaaggtaacataaccttctcaagacagtaagtatagagtgatggtgcacactggaagagatggtagaattaggcaggatattgtaagccttgaaaaagaattaggcaggatatcggaagccctgattagattctatcctaagagcaacagaagatcactgacagtgttttaaatagatagactagtttattagatttgcagtttagaagttccctttttttgtaattattggacagtgtagagaccggatggtgagagatgagttaggaagttgtgacagctctctatacctaccgctaatgtagaggattatttattttcatttcattaccattcgtgtaaggtgtgtgtgtgtgtgtgtgtgtgtgtgtgtgtatagctagtttctctatagaaattatatggaagagtaagaaggcttcactttaaaattcatgtttttaatgagagtattttctgaatatgagacacttaccctcatttattttggccagggtgttggaactcgccataaggcattgatcaggattatggtttcccgttctgaaattgacatgaatgatatcaaagcattctatcagaagatgtatggtatctccctttgccaagccatcctggtatgttttgattcctctaatgccatcccaacaaatgaaagttctttttgcaagatcttcaaggagaagagttgacttattgtatctataaatttaatatgtaagattaatttaatatattatggtgtatacttcatgagtaaattgaactttcactggtaaaatctactagtgagttctctactgaaatactgggtacatttttcaactaaagtcatggaaacatttagtttcccatgcataaattcagcaagcagaatattctagtgttccccctagggtagatagacattgtggtttattttgccattaatatttgtcagaggattagaaactccttattcaaaatatttatcttaattctatcacatgtaaaatgtttaaaatttatgttcaaattgtctcataagaatgttaaaaaataagacaaagaacagtcaagggttttggacttactgaaaggtagataacgattcaaatttaattaattagtcatattggataactaaaatctacccagaaaatgtgagaaaattacaggcactatacatttctcttcttctggtgagtgaatcaggtatctcctcacataagatatgagattatattgtgttatacttatttaattttgtgtgatatttcattcatagaaaataatggcactaatataaaacataattaattcagaaaagtttgtaatctcagtcttgaaggctattgcttttttatgcaatgataaaaaatcagttatctgttgtatatattgtttaattaagtgaatggtaatgtgtaatctcatctacagctaagtctaaaaataattcttctataagtaaaaaaaaatagagaattatggtttcgactaacattaagtatacctttttttgaatcaacaggatgaaaccaaaggagattatgagaaaatcctggtggctctttgtggaggaaactaaacattcccttgatggtctcaagctatgatcagaagactttaattatatattttcatcctataagcttaaataggaaagtttcttcaacaggattacagtgtagctacctacatgctgaaaaatatagcctttaaatcatttttatattataactctgtataatagagataagtccattttttaaaaatgttttccccaaaccataaaaccctatacaagttgttctagtaacaatacatgagaaagatgtctatgtagctgaaaataaaatgacgtcacaagacaa

SEQ ID NO: 43 - DNA, 50836 bp, Homo sapiens
  source 1..50836: mol_type = genomic DNA
gctcagcatttggggacgctctcagctctcggcgcacggcccaggtaagcggggcgcgccctgcccgcccgcgatgggccgccagctagcggggtgtggagacgctgggaagaagggtacggcctggcagggaggccccggcaactggccccggaggccgtcgggggcagggggctgaagggacggccggcactggagagtctttggggagggggctcagggacaaggtgtttggggcaggggtgaggggccaccggccctcgggccgggagggtgcagggcagaggtggtggggggtcgggcttctctaagaagccctagcgggagcggggcgaggcggcgtggggagaggggcggagggaggccccgcattccagacgcgccaggcgccgccgaggcagggcgtggccgcccagggagccgcaggtccccggcgcagcagtagcaagtgggctttccactgccctctagaaagtgccccccatctgctctaagttactgtactcgaaacaaacgcgcgcttgtggagttgaaccgaccagcaggagggaagtagcgggggaagacgagaggggggagtgtgagtaggcacccctcagccccccataaaagaagacattaaaacgtcagttattccccttgctctaggttatcttgtagcatagcaacttcggatttcactctacccggagagtttcccgcttggttgaacacattggcctcaggaaggtagtgtcccccatgattctgtggggagggttgtcctgttactcgccatgatgtgacaatgagtcaggaactgagagtagagagaagggcgtggccccggggcctctcccttctggccgctctgtgcagctggccccactgctggtgtggagggcttgggttccatcagccggctgttgagaagaaggaggggaacacagataagtttcctcatctgggaaggtggcttaaggatgcctattcttaccaccacccagagttattggagatttcaaaaaacacagtcattaggtaataaatgtgtaaagtacacaaaaaacaaagtgctgtgcaaatgcaaagtgtcatttttgtagtaagattgccgttttaaagctgtgggtgttctgagtgcgtgtgtaaaagagcagtggcctcatgggtgcacgctgggccattaccaagaaccttaagttgttggtgtgcaaaggcctgggccccagactgtactgatggattctgttcacacgtgtgtgctactgtgcctgtctggaacttggtgacttggaatgcagaatgcactttcccactgaaacagtgttgcagaaggtgctgacgttcccaggctagccctgaaagacctttttaacatgcactgcctgattatgggattggtggtggggaggtggagggtagtgaggggcaatgtgtgtgtaggaagactaaatcactgaaatatttttctggaactttttttagctttaaggttgacactgagtaaattattttaattggaaaattatgtctttgcccctgttccactttcttttttccaccttccacctccttagagacgctcttctggctcttccgtgacgcattacaacagccatccaggccggtccagttacgctgcattccttcctccttcccatttcggcggacctgcatccagctagagactagcagattgaatcgatattcattaagttaggaatggttggtggtcctaagagcctcagcaaccgagaggagtcttgttatttaaaaaacaacgatactgggcgtggtcgtgggcctgtagtcccagctgctcaagctagtggatctcttgagtccaaggccaatgtgagcaacatagcaagacccagtctcaaaaaataaatacataataataataaaaaaccctcgttcacctaaacagatctataatttatagaatgtaaagcagcaatattcaggcaatattaaggaagatttttggtaagactggggcagcagaggtgcccttgatgggcaagggccaggagtgttaacacagtcctgcttagtaatttcttcccttcttccaagtctgtcgattatctaaaggtcaagggtttgtccaaaaatgtcccttgcatctgcagtggaaggatgtgacatgtatgtgcatttttacaattggaggtttgtgatttggagaccgtttagattttgtaatttcccgcagtgccaactagactgcctgtggtaaatgcccaggaaatattgctgactcactgactttgattaggagctcagtcttgcactggagtctcaatatttagcatcttgtgtctttgagctattaaactatggtattgattgacattaggctcgcagtcatggccgttagtttcctggctaatttctgatttaagtagttttcctggcaaagtagatgtgcttctataattgctattgattttgagggctgtaggctcttcctacaccactgggcctagaatctggcactaatgcattgtctggagcctttgttctcacccttcgcttgtgcagagcctggagcctgcggagacatttttcattaaaggagagcgggattgtcacaaaaggagtctcaggctctagtgggctgctttaaacaaccatttattccacaaaatattaattacctactgtgttccactcatagttatgagcactagggatacagcagtgaacaaaacagacccccgccaaaaataaaatccctgctctttagaccttaaatctggcggagagagaaggaaaagagacaaaataagtgaattgttggattttaaactttatattttcccaaattaatactagtttctaaacttggtgggagttcatttcccctttaatccagctgttccacagacctaaacttcacattttacctacctcggggaagttttgcttaaaattatggtgtcttaagctgccttccagattcaattgtgagaattaaatagaaatggaatgttcctcttttttttcacatgagaatcctcttcacttgccctggtgccacaccctattctagttgtaggccacaccagaggaaattccagtccttcaaaaaaattctttccacccattcactgcctggtatcttttttcttctgctgttgccagaggcagtcctcatctactttctccagggacaggtcagcagtaggggtcaggagatgcccatatttgtccttctgggtggttctaccagatgacttccaaatctcccttctagggtacaccctgaagctgtttttttttttcttttttttttcttttgagatggagcctggctctgtcacccagcctggagtgtagtcgcacgatctctcctcactgtagcctccgcctcccaggttcaagtgattctccagcctcaccctcccgagtagctgggattacaggtgcctaccaccatgccgggctaatctttgtatttttagtagagacagggtttcatcatgttggccaggctggtctggaactgttgagctcaagtgatccgcctgtctcggcttcccaaactgctgggattacaggcgtgagccactatgcctggcccaccctgaagcttttaatccagctgagctcaactggacaggtcggtagcacccaagtggcctgagttttaccccaggtgtggtgtagaaatttcttattctagggagtgactgtgttatggagccctttgtccatgtcctttgtctccctgccacacccaggctatacactcacagctcagaggaaatcagagtcctaaggccactcgtacatcctgcctctttgctgccttcttgctaggagttgtaggttacgttcccatgtggtcctatggacagagctagggtccaagtatccctgacagcacagaggtggggggcatggctatatgttgataagaggctgccctgaagcgacctgctgggctttgctaagatttgcagaagttggtgatttaagcctccaactctgaatgcacggaactggaactgcattcgaaatgtccagtctgagggagagagaaaattgaggaaggagagtgtgttggaaaagaagaaaaaaagactttctaatatagaaagacccagtgtgtgtaaaccatcccaagatgaaattgaatgcctatcgtgtgccaggcactgtgctcagacctatgaggaaacaggagggagttaagttggaaaccctgtgggcggataatacggaagacagactttacacatgtaactctaatgttgcacagacacacaaaaagctgcagaagcacagggcaaggaggggtgtgtgagaaaggcggcatttatgatttcctgtatcctaaagactcattcagatgtcagctaattaagattgaggttcctggtggagggaacttagaaagtgctgagcgtgtttggagaagagttaacagtccagttaactcttctgtgcaggatgcgtgtatgcatgtgtgtgtgtatagaagatatttaaggaaaggtaggtaagtccacagtgtggaaggtcttgaatgctgacattagacttttttctgtaggcggccaggccctgttgaaaatacaatatgtgggccataaaacactgaaattgagttgcagacttgaaggcctggatttcccaaccctgaaagtgcttcatgccaagtgacatcattcttcctgccggtctctttccacccactccaaccccagatcaggataccagcagagagaggctgtgagagcatgaagctgcaacaagtcagtagggagcaaacaaatattgattcagatcaggccacagaagagacaagctggagcaagtgctgtgtgtccctcctgctcagtttgatcgaggtcactgggccgaattccaggaattctggggaatgagttggccctgtgactcagtcattaatcaagaccataaaaccaaggagaagaatatctgctttcaaaaaggttctgataaataaagatgcagtaggtgggtggaggatggagtacagtgggaacccctctcctcacccagtacatttttttttttttttttttttagtttaaaattccagtgtggcctgtagactgtgtgtccaggactgtgtacagtaagagctttgatggagaacccaactctccacactcccacctctacccatttttgctttaaaatcttcatttgaatcaccagtccctgattgattcaccatggttgctaagaatctgttttgcggtaacgcatcaacactccacgtttaaactgtgaagtgggtgtgtccacaaaacttctggattagactcagatttgcctgtgcagaccagccctgttgcagtatgtttttgtttgttcagattaacatttgggctttttggaactggttcttaatttagttcagtagaatgtgtttttactatttgaagtgttgacttttaagttttcttttgtttgtttgttttaacctttttgtaaacttttactcttctttttgggagtaaagttaaaactgcttcacttgtcctttttttgtttgtaactgcactttcgtagtgaagcaatagaatacaataaaatctatagagtttttttttttttaataaggacaaacccttaaattattaggttggtacaaaagttaattgtggtttttgccattaaaagtaatggcagttatttttgcaccaacctaaataatatagtccttatgttaaatgtaaatgacttgtttctcaataactgcactgatttcattaatgatcagccttgcactgtgagcttttttagccaggcattcacagtctcatttatcagccttttcaaggcagaagaaactgttcttttcattagggtggggccaagtgacctgttttcctacccaagtagtgaatgattttaaaccagtttgaggtgggtatggctcttatcagtgagtctccctgtacctctagtttatttccttaaacagaaaaacgttctctgataaagggtcattttaatgatgttgtctagtgaccctgccctccctgggaatggaaggcacggcactgatgtgtatgtagatgtactcatcaacagattgaatttgctgatttttttttttttttcttgttggagagttgaaaccagtcggcaagctgggtgaggttgaagtgttggaaagagtggtgcaaactgccattttcatgttctttagagaagtctgccagaaaaggagtagtggttctgtttttaatggatttatgagttttatacggtgatgaggagtgagtagaggtgaaattgtctcatacagcatgtaggctttattttttattttcattcaaaacagtaagtacactgaagtcagagtagttgttttcagtaagaaaattctgcctccagagcaaatgttttggtgaatagataaatatgagtactgagtcccaatcattttggctcataggttccccagtatttccataggcaagcttaactttgcaccattcagagacttatattttaggttccccacagggcaccccactggacgtggctcattttccagcctgtagtcttgttcttctgccaccctggggcattattcctcttcccctctccccaggccttcccccttgcttcttggctggaacctcccatggtgattcacccttctcagcctaggcagacagcacctccctgttaagcccttaactaatcccgctctgatggctgtgatctttctctctgtgtcttaatcacttggaataaagaaccattgtggtgaggttgaaagggcattggcccaggagtctggggatctgggttttggccctgcctcagctacttaattcactgggtgaccctggactagactctcagtgtgtcacagaggcacgaagggaagagagctcaaaggtcctgcagggtggaagtctgcatttcacagttttataagtgtcttttgtatcctttaatatagtgcaggctcagcgtatgcttggtatgggttcgttgattaattccttgcgtattaccagtgtttgtaacctacagtagcactgccaagacttccttttcctgctttcaaggatagcagcacactgacacattctcattagtcaaatatgctatattaaactaatgttttaacaaacagtgaatcgcaaagccaactgttccttccagcgaataatagatcatatgcaaaatgactttgcattgctaggggatttgatggagtgaagaagcaagcactgtattttatttctttttattttgttttgttttttggacataacctcaagattttattgtcctcataataaaacaaaagatgatgcttagaactggatcacttggccctttcttttgttatctcctcccagttgaaaatgtttgcatgtcttaacagccagcattttcttagatctgcagatggggtcagcacactcaagcctcagcacaacctcctttgtaattttacccgttttccagaaaattgccttagtctacccaccatagtcactctgcttcttgtcataacgccgctttccctgggcatacagggagtcctggtattgtgccgttttgtggggttggtgcttgccacacttcttacagaaagcccagtgggttttaggaatgttcaccatgttttccggaatgctatcggcatgggaggaaagtggccatattttatttctagggtgaaaatgtttgccattaaactcacatgaagtaggaaatatttatatggatacaaaaggcacctgcatgggataatgtcaaatttcatagatactgctttgtggtaagtgtgactttgtggttattgtgatgtttgtgttttgttttttttttctgcaaaatggttatacatagtataaatgttatgcaaaatagcaactcattgttttcaagttgatttagcacctgcattatgtaaagataatctgaaatctgtagggggactgggactatgtagggaagatgaggtcaaccatatactttctactgctttgaattgtacctatgcattcaccatttgaatacttggcacgtgtagggcacttaaaacattctgccgaatggatgaatgaagtggtatcaaaaagtgccctggcagtgaaaggcaagatagagttctgtagagtaggggtcgtggtgaccctgttggagcagatactgaagtagtggtgagtgcggagaggcaagtcacattttggccctagtcaactgtagctgaggagtaaacagagggaactgtttactgtttacaggattctgatgctcatctttgaaggctgggctctgctggaggactgattttgaatgatgtcaaatgattttgacaagattaaatggggagatttagttggtggtggcatgcaggactgatttgatgaaagagcagcacagttatgaatggtgaaaccgaaaggaagatttgtggggcttttaacagtctcctcaaggtgttgtggctgtgggagaagaattaacatgaatggagagtgtaaagaagcctatcagattgtctttgatctgcacagtactggggagtcccatgtgggacacgggtaggcagcagtctacaaagctcagagctggaaagacaacttgaaagaacaacacaatgaaaagttaccgtgcctctagttgagattttctaaacatcggaaccaatgtgaggtgtctgatttcataaacaagtggaatttaatctatactctctaagtggaaacaactctgtttgcaactctgacttgctagttccctggttttgcttttgttttacgtttggcattttttatttcttgcctgtttatggtagagactagaattctgcacagcagatgacaacagtttatcccctgctgcagacctggtccagttctgactgagtccaggggtgatagttaaggccagggcttgggtggtttgatgtccatcctaggagtttcacctctgcttcggtaattctcgggctgagggatactgatgagaccctctagaatgtttcttggtccatgttgaagttagagatttcttgctctgtcaagaagactgtcagcctgggcaaggtaacgcgacattatctctactggaaaaaaaaaagccaggtgtagtggcacacgcctgtagtcccagctacttgggaggctgaggcaggaggatctcttgagtcctggagatcaaggctgcagtgagctatgattgcaccactgcactccagcctgggtaacagagagagaaaccctgtctcagacaaaaaaaaaaaaaaaaaaggtctaggtgtggtggctaacccctgtaatctcagtgctttggtaggctaaggcggagggattgcttgagcccaggaattcaagaccagcctgggcaacacagtgggaccttgtctctactgaaacattaaaaaaaaaaggaaaaaaaatggaaaaaggaaaaaggaaattaaatggaaataagatatattcaacatatcatagttgtaattgtaatatatgatcaatatataaattattgggctggacacagtggtttatgcccgtaatctcagtgcttggatcacttgaggctaggagttcgagaccagcctgggcaacatagcaagaccctgcctttaccaagaaagaaattataaatgagaaattttatataattttttcatactatgtcttcaaaattcagaatgtcctttacacttatagcacatctcagtttgaactgaccacatttcagatgctttgtagccacatgaggctggtggctactgtattggacggttctgctacagagcaagactattctaaattgtctttttttttttttgagacggagttttgctcttgttgcccaggctggagtgcagtggtgtgatcttggctcactgctacctctgccttctggtttcaagctattctcctgtctcagcctcccgagtagttgggattacaggcgcccgcccccacgcccagctaatttttgtatttttagtagagatggggtttcaccatgttggccaggctggtctctatctcctgacctcgtgatctgcctgcctcggcctcccacagtgctgggattacaggtgtgagccaccgcacccggccgattgtcttcatttttaggaaagttttaggttcatggcaaagttgaatagaaaatacaaagaatgcccatgttcccctgttcccacatacgcatagcttccactgtcaacatcccgtatcagggtggtacatttgttagaactgatgaacctacattgacacatcgttaccactcaaagtccatcgtttacattagcattcactgttggtgttgtacatagatgcatccaccattacaatatcagatagaatcatttcattgccttaataatcccctcccctgaatccctgatctttttgctgtccccataattttgccttttccagaatggtatgaagttggaactatacactgtattaccttttcagttggcttctttcactcagcaatgtgcaatttaggttcctctgtgtcttttcatggcttgatggctcatttcttttcagtgctgaataatattccatgtctgaatgtaccacagtttatttctagagcaatactttttacaaaccagaattataccccaacggtgggacaaattggggtggggaggctgtctgagagttgtgagtgtgggggaagtggaaggtctttgactgacttttcgctgtgcataaaaagcttctgtgagcatcaagaagagagtagtggtctgggggagagcccaggatgagaatcttgcaaaaatacatccttcaccacaactaaaggcgaatcctctcctcttacatttccccactttcttcccacaccaggcctgggatctgcttagtccaaaatgttcctataagttagcaaatatctatgtcacatactctcgccaaaccagttttatgaaaatatttagactaaacaaagtgaagagaatagaaagctgtatttgcatgtgtgcagtttccttgatcaaagaatattaagcaaaaagagaccaaagcaggagtcactgcaatttaaatgtcgttcctgtctatttcaggacgcagctctactctgttttctttattcttggggtgattatgttgatgacctgtcttgtctctgttgagataaatttaccaccaattgagcactccttattggcagggattgggtgtatcaattccgagaactgtatgattgcaaaggtggaaagccaattcatcaggctattgttttgctgccccattaagtatattaactggaagatgacttcatttcaaccatttcaaatcttaaatacaacagattcagtcctttatggaatgagttaaggtcagaaaatctgtccatcgtctttctcataaatactttaatatcttccaagtatcattggactaagaaagtaattatgggtaataataaagattccaattaagaattagggcaacatgaaaatgctactaatttcgattcacatcgtagctttcaggtccttctcaatatgtttaattacttgtgagaaatacagaagtagtggctggttcggcaagcccatcaccttttatgagaagtagaagactcagttttatcctgtctgaacaggttgcattagccatggggaacattttgtttttgcattcacacatcagtctccccaggttctgtttacacagaggaagagaaagactggctagtttagtagtccatcccaacccaaggcagaccatctctgaggtttagtttttacagtcgtaagatgggaattgcatctgtttgcaaaaactactccaatatcgtcagatgaaatggtccaaggagtagaaattagcataatgaatcgctgtgcttcagagtaaaggagagcctcttcataaagactttttgttgtactttttttccagcttccttcaaaatgtctactgttcacgaaatcctgtgcaagctcagcttggagggtgatgtaagtatatcactttcactttatataatttttgcaagttggacatctctctggataaccatattactctctatccttgtacatctaaggaagatggggacaattcagacagtcatcatttggttctcctctttcttaatacttcagctgttcctagtagttcaatttgaaggaaatatcatggcactggaaacttttcttggcctcacattaaaattggacagaattagtgacactggaatggctggaattttattctgccatacttagcatgtcattggtaataactgttatgatggtacatgacttttaatgtcatgtcctgggattttattactggttggcataagccacagccatatcaaaactaattctgcatcttttggatttcttacagtgtccaggaagttattccagatgaagacttatacttttattttatttattaatttattcattttttgagatggagtctcactctgttgccaggctggagtgcagtggcgtgatctcggctcactgcaacctccacctcctgggttcaagcaattctcctgcctcagcctccccagtagctgggactacaggtgtgcaccactacacccagctaatttttgtatttttagttgagactgggtttcaccatgttggccaggatggttttgatctcttgacttcgtgatctgcctgccttggcctcccaaagtgctgggattacaggtgggagccaccatgcctggctcgaggacctatactttaaaaaatttcacacctggaaaatattttctctaaaaaagctaggatatttcttttaaaaaaccaagaatataatgaaattattgtaattcatctgtttcctttttttctgtggctattagggaatttagaactaaactgaattttctttcataggaaatatgtgaacctagaaattctgttgcatttgtttcttttttttacaaataaaaaatttaagctatatgtgaagttaaaattatttcaaatacttttagaatcaagtggaatataaattatgaatatgtaaaatagctaatggtactatacatcttccaggtcatcctggcagaaatggcttttacgcagactcagcactgatactggtttgtagccatatccgacagatctttcaaaatattctttgattgaaattaaaatgcaatgaatcactcaacagagggttgacagtgacttgggtcacatggtgcaagaccctctgtattgttcatggtacttgccatcaaaatgttcaaattaatggagcctgtgaaagcacaggttgtatggagtataaagcctatagagtttttttaaaatcttttttcttcttgaaacgtgtgcatgctgtttttgggaacaatacaaactgcatgttgaagtcagacaaattcaggtgctaaataatttgtttctctaatggacttagattgtatttgctatcaggttttataagagggctttttgtgtagcctctgaagttactctagtatatttcttatgtgtggagaggtggggcagaaatagaaaatgtcacatgttccccattattttaaggaaagaaaagataactttgtctcactaatttcatttcagacaagtggattttataggtaataggttcaattctcgatttaatttcatttccagagacactataaaatgacacaaaacttttccccctcactgttgtttttggaacaagacgacatatctcctggtaaatgcagtcatacatgatatggctcaatgcctggactgcctgccttgtaaataaccgatggcactcttaataaatgggaaaatgtttttccttagatttcatccacattttatagctaccatagcaaacacactgagtatttcaaaatagcactttgcctttttcctgaatgtgtgctccatgtcatcaagttcatcttactggaaagtttaagtggtgaaattagatggaacatactttgataatgcattgcatgtcaggttataaatatgaactggatttaatatttggccaagatagtcctcacaagtgcgtttggaaacatttgtcaaatgctgaacttagatttctggcctctcctgggagtcatctagatataggaaggcatcttagatgctcacctatacagtctcagtgctaataaaatggaatggcgtgggtgctgggtggtttataatgtgatgcctgtgggtggagaagtaactcacggatcttggccttttcactcttcacagaaactgcgccaaggccaagtcatcacattatacgggcattatgtgctgggggggttggggtgggttgcaggatgggagccttgatgatgaggatgggcagtgatgctgcctccaccagccatcagccaaccacaaccacaatgtacatcctctttgtctgcccttagctttgggactgggtagcagggagagggaaaactataagagcatttcaaagaaggagggaagttaataccttgaaaggagaactgacgtagaagcactccattgtccttacctcaatctggaatgggagattcccatctgtcagatcaggaaggataatgagctttgaaaagcactgaaaggctgggcgtgagccaccacgcctgtaatcccagcactttgggaggccaagatgggaggatcactagagcccaggagttcaagagcagcctgggcaacacggcgaaatcctgtctctacaaaaaatatgaaaaaattagcccggtgtggtggcaggtgcctgtaatcccagatactcaggaggctgatgtgggaggatcatctgagcccaggaggttgaggctgcactgagccatgatcacaccattgcattccagcatgggcaacagagtgagaccctacctaagaaaagaaagaaaagaaaagaaaagcattgggaaaggaagagggtatggtttagaaggcaataagaaatcttaggaagagtggagggtggtaggcacaagggatggtattaataaaggcagagggaaggatacagaggagagggggggaaacacaaggaggatgtgggccgtctggccagaccaccttggtgccacagtggtgaccaaagtaaagaggtgggagaagctgcttccctcatttatctgaattgtaagctcagcaacactggcccagtagaaattcatgtacctgtagcagaaacttagctaaacacccttgtccttgaggcatttccacattttcagcttatttcgaattgttgccagcccagtttaatggtcttcagagccatcctgagtaaatgctggcttcaggtctccagctttgcattgtctacttttgatctctcactaaaagtaagatgagaagttgaaattgagacagcatattctaaactagctgagcctttgaagaattcttattagaaaaaatgaaattgcttgcgtgaagtgtgatggtgtgttaatacctacctagttacctagtatgagaatgatctgaattgttaaaagaaacaataggaaaacatattaggcattgttatttcaacaagaggattttaaatgtgtgtcatttgagtatgtttatcttttaacctcagcactctacacccccaagtgcatatgggtctgtcaaagcctatactaactttgatgctgagcgggatgctttgaacattgaaacagccatcaagaccaaaggtaggtgatacatttgtcctcttcttgtcagggtcttactgagacatttttggttgtctctttattctccctcaaatcgccatacgttggcgatttgaaattgtcatcgagctttaatggagtagatccagacctagctcaacccatgcctcctttccttccttccctccttcctttctttctttttccttttctccttccctcccttctccctttcttccttctctccctctttctctttctcccttcttcctgctcttccttccttcctccctccctccctccctcccctcccttctttcctttcctccctcccttccattctttcctcccccaccccccgtttcttctctttggagagatgtacagcatgagatagtattttaaccaagtaatggttaaaaggaatcagtctgggagccggatctggtcctaggggtatgcttttgggtgcagctcttcactttgaggcttcagtccctcttctgcaaggaagaagttggtcatagtggtccctaagggcattttttgttccaagtcccctttaatttaattacatttgctgggaaaatcttactgcattgctcttagattgatctagagagtgaaaaattcagactttttttgttttttttaaaccccggtaagttctgctgctccttaggcctggagctggaattagaagagctgtcagaatgagtgtatttcctcaagttctaggatgagtaagagaagaccaggaggcgtaaaagccttcctcttgaaataaagcaaataaagtgctaactggttagggttgagcaagagcttcttatggtcattatattgttttctgggtctacaaaataggatgttcagactttctgggcttatattaattaagcaatccttggggttgtcccatcccctgaatccctgaaaaatattgcagctctcgtggtgacttttgtgattctccacttttccccccttggataaagcacttcctttcaccatgaggccagattgggatgcagacgtgacccagcacaattagagctgctgctggttcgtgcccctggtgaagagccatgtcacatttttctcttctatgtacagcgttttaacttactgacacacttatatagttcacatacggttcgttgaaagactgagaaacctcaaccaggctgacctgggaacctataactaggatgacgtcctggtttatgcctgcgtatttactaatagtgcacctttcactctcagaactgtcttattttggaggatacattacatggtcacctttcctaaaaccatgtagaatctggtgaccttgtttccagagacaggaagtagagtagaaaaacccgcttaacgttctatggttctaacaagatgtgaggatttatttgcatcatctgccttggggaagccttatgttctgcagttgctgtggaccaccccccagatgactgtctgcacagctgagggcagaataatgaagcatccaaattagacctttaaaaaaaaaatctttttttttttttttttttttgagatggagtttcactcttgttgcccaggctggagtgcaagggcatcatctcagctcactgcaacctccacctcccgggctcaagtgattcttctgcctcagcctccctaatagctgggattacaggcacacaccaccatgcccagctaattttctgtttttagtagagacagggtttctccatgttggtcagcctggtctcgaactccctcacctctggtgatccgcccgccttggcctcccaaagtgctgggagtacaggtatgagccgtcgcacccagcccaatcttttttcttttttttttttttttggtgcatttaaatgaccattcttgccaaaagttactactcagaaaattaaactaaaatctgcagggcttatttcactacagccagttccagtcagtggagcatagtggatgagagcgtatgtgagcccaggttcaaatgctggctccacaactcactcattagccacccgacttggggaaaacacggaactttgctaagactgagtttccttgcctataaaggggtgctaatcaaagttcccacctcacgggattgttgtaaagtatgaagcatttagcacgatgcctggcatatagatggtactcaaaatatgttaccttaaaacacacacacgtacaagcacatgcacacacacatgcacatacacatccatgtggtttgctttcctaaaacccatcctatttcactatttggatgtgcctagattcatgtggtttcccagcatgtcattgcagcagccctaagtttagcagttaactcatctagcaaagatggtgcttttcacaagcatgggacaaagacttcttttgtccctgcgtgagaaagcacttagtgcactggaatgtaaagattgcgcaaatgaactctggtcacagctgaaactctcatggtaataaaaataccttcaggccttttggagttagtagaaaaatactgtagtttttagacagaaacgtctggagggctaagatttagattccgacattccagtttgatcaaaagcagctgacattatcatcattgcaactatttataaaatgctcgttgtgggcagatactgcaccaggcacttcaggaacattcatcttagatgaacttcaaagtaacctctgatgtagtgttctgtcatccccaggtcttggatgatacaagtcaggattagtatgcctgaggtcttttggccttggatcaaactgggatttgaacacacctctgtccacccctaggcctgtgttcttaggcaccataatgttgtagcactcacctgtgaggaatggatttttttcattgccttggatttttttcattgccttgaattattttcagatatgaaaaacattgttcatctgtggtcttactgacttctgttaagtctcatatttgtggtctagctttagattctccatctccttttttttcccccagacttaatgttcagtgagtttcacttaggtccactttttatttattttatttttattcatttatttttttgagatggagtttcgctgtgtcacccaggctggagtgcagtggtgtgatcttggctcactgcaacctctgcctcctgggttcaagcagttctctgcctcagcctcccgagtagctgggattacaggtgtgcgccaccacacctggttaatttttgtatttttagtagagacggggtttcaccatcttgggcaggctggtcttgaactcctgacctcgtgatccacccgctttggcctcccaaagtgctgggattatagccgtgagccaccgcgcctggcctatttatttatttacttatttatatatatattgtaagacagagtcttgctgtgtcaccaggctggagtgcagtggcacaatctcggctcactgcaacctctgcttcctgggttcaagctattctcatgcctcagcctcccaagtagttgggactataggcgtgtgccaccatgcctggctaatttttgtatttttagtagagacggggttttgccatcttggccaggctgctctcgaactcctggcctcaagtgatccgctgacctcagcctcccaaagtgctgggattacaggtatgagacaccgcacccagcctacttatttttgatgcttagtgattttagagagtaagtaggttttgcaagtccattggtcctttaaaataatttctagattgttggcattattaaaaccctaaatccttttaggaactattgcgaagaaagaatatgatattcgtaagagctcagtgctaatattagcattggttatggtagtgaaagaccagataaatcttttagttgggaagtatgtcttgaggtatacttccttataatcattaagtaaataagtaaaactatattacatagataatgtgtaactctctgtattacatagaatgtctgcagaatgtagataggaaaaataaagtttgtcaataattttcaacatctttattgagatacagttaatctgccatacgatttgcctatataaagtgtacatttcagtgtgtttagtagtgtatttgcagagttgtgcagtcatcaccacagtaacttccctaacactcattttaacatccattcaccttaaatgtgtcagttgcatcaagaaatagaaatgggatggtatatgctatgtgatcacaaccacaaccattttttttttctttttgaggcggagtctcactctgttgcccaggctggggtgcagtggcatgatcttgactcactgcaacctctgcctcctggcagaaccctcctgggttcaagcaattctcctgtttcagcctcttgagtagctgggaccacaggcatgcaccaccacacctggctaatttttgtatttttagtagagacagggtttaaccatgttggccaggctcgtctcgcactcctgacctcatgtgatccacctgtcttggcctccgaaagtgctgggattacaggtgtgaaatcataggcctggcctatgatttcttttaatcaaaaaagaaaaaataaaaggcattagcaatggaaacagacgtacgtcacttcatggtccttcctttactgcactgtgtagatattatggtttttacaaattgaagatttgtggcaatgctattcactttgtctctgtgccagcattttttagaaataaaagtattttttaaatttagttatgtgttttttagacataatgctattacacacttaatataatataatcacacttttatatgcattgggaaaccaaattgtgtgacttgcattattgctatatttgctttattgtgatggtctggaaccgaaccagtagtatctccgaggtatgcctgtatatggaattgtgggcaattgctccttttcctttcttgggctttcagtatattctgtatttctgtattttgcaaattttctatgatgacttgtattactttcatagtggaaggcagtaaacttaattaaaaacaaaaatgaagtcattagttggaaaggataacaacccttttgttccttcctccttctccttgatattattagatactggataactaaaaccacttaaaaatgagctaattaagatcttaccttctttttttagaatgccttttgccttaagtgtaattaagaagcttacaccacaccttggccccactcccacctctaacccttcatcgggaagagacaatactaagtagttggtgtttccttgacatcaaaggacacggtataaacctcaagtattgatagaaacaaaagccagaggaccatgtgacgatgactggccctctttctctcctagacgggggtagccgtgtgtacacacgtgtgtgtgagtgtgccgggacgctacccactccatgtaatgttccattgatttccctgtggtctgtgtgctctcaggaagaagagctgggagcaggccaccttggaggaggcttaatcagctgctgtcgagtacacggatggtgcacaggagcaggcctggagtgggatgatggcgaggagggtagagctggtcagagacctgtttgggggcactgcttgccatggccagggcatggctgcaggagtcacgaaggctgttctcacagacgaactgtcagtcacacctgctcttcttggtgtgagctaaagctcctcacttgcagccctctgttagaggagagaggctacttttcccagccagtctgcctcctggcaccctcgagagaatatattcctaattgctgtgctcaactgaatgaatatacctccaggtgtgcagacaaaaccaaaaatacctgtcctggctcactttccagtgcttgggaggcagctcttattcaccccttcccctaactcttgtcacccctctcctgtgagctgttatggcatctgtcgtcgtcgtcttctttttttttttttgagacagagttttgctcttgttgcccaggctggagtgcaatgcacaatgtcggctcactgcaacctcgcctcccgggttcaagcgattctcctacctcagcctcccgagtagctgggattacaggcatgtgccaccatgcccggctaatttttttttgcatttttagtagagatggtgtttctccatgttggtcaggctggtcttgagctcctgacctcaggtgatccgcctgcctcagcctcccaaagtgctgggattacgggtgtgagccactgcgcctggcctatggcatctgtcttctaagggacctccctgcttcagcctttacagagtatctttctagcctcgtctctggctctgttcacggccctctacagagcatgcctctgcctttgttctttgaggagcgtgtagcctccttcctccccacctcaaacatctgcgcagttcccatttacctctcagcctgggccagtgcacagcatcaacaagctttctctgagaaggcagaaccagctatttcttggtctgtgttctcatcatactctacatactcgtttattgtgcttatgagaaggggggagaagcacaatactgctaaaatcaaaataagtctgctttgtttctagtttgaagggatctcagtattttttgcctgtgctgcctaaaccaaatgcaggattgttttatgtatgctccgtcctgaggtagactatgcaacgacttaccttaatttatgtctggttagaaactgagtacagtcatgcaaaagtagtaatactgcttaattaacaagaggttgctgagacttaatctgtaggagtctcttggtttagattggccttgggttaaatatatacgatggcgtgtacaacacagctgtgaatggtttaccatatgggtccaaataactagaaaggagagtcagctaaattagaaaaggatgaatcgagactccagaaaatagactgtaattagcagcagcacaaccccagagttagtgtaagtgccaataaactggtacagctttggtctctctctggaaggggagggtaatgaattaccctattattattgccagttttgattttagcagtatttgtgttctccggaagggatgcaaaagtgggtgatttttctcccccctttctcagaagcgcaagtatagaagcataactgcacgaagttttgcacttatttttttcttatacttttaaaatagaactgcttaagatttctgtggccaaaagactaacatcccatgccactgcagaacaagccaggatggatatttttggtttcacctgcacgccaggtatattcatttggctgagcagaacaattagaaatatattctcttgagggcgccaagaggcagactggctgggaaaagtagcctctctcctctaacggagggctgcaagtgaggagctaaaccaacaagagcaggtctgagtgtgagctcttctgtgactcacgtagcccagggccttctcaccctcctggaagggaacgggagggaacggacccttcccagttgctgaggcctttctctctgtgttcaagtttactttagactgacttctcatcttacagcagtgctgggaacaaagaggccagtgctgagtcacagccaccctgtgactctgccagcacagattttctttgtagtgatatttgtctatgtatctatgtaggtgccagacctgagccacgtagctatcaaacactggaaaaggagtccttggtgcctttctaattgtaagcatcagctttcatcacctgcctctcttcagctctttctttttttaaaaaacagttagctcttttccctgaggaaatccaaataccagtttcacccagggacaatggcagtaaccagattctaatctggtgtcagcaatgccaagaaaattctccaatatcaagtgagttaagggtggctgcgttggtttctctcgcatctgttcacattttttaattttctgtcccatgaggctgacggagtagcagagcacaatacagggcttgcattttatgcatgttccttcactgacgatttgatttgaatcttgagcagtggtgtactttgtgttttcctgctggtcttgtagcttgtttcagaaatataattctgcatggaaggcagacaaggttctagattattaaagcagccggtgagattaccaagtcgatgataccttaaatcctttctaaggaactcagctgaagtgagatcaaagcagaatggaaatagaagaaatctgatttttggaccaaaaccacttcttaggcacttagctaaactacactttccccgagttgagactgtgtgccccagctgtgccaggcttgggagaggcacccaactcccctgcctcatttcaccctgtgcaatgcctactttctctcccatctcttggcagctgccagagtttgtcatgtaactggactactcatccatgtgtgccaatggcaaaaatgttctctatctttctttgccccatatttcacaggcagaaattcaaatgcaggcaggggccaggcttgtgacagagaagctgaatgaaggcagtagatgtgtttctagtcgttaactcagccagtcttttctgcatcctggtaaaataagtattatcattatctctgttctataggggtgagatacctaggcctaggaagagaactaatgtgccccaggatctcacaggtctgagtcccatggagtttccaaagcactatattgtggctgctacttatccagaggcctcccctggcatctgtcagcctgctgggtgtcctgtcttgatgagagacgctctggagacacagtgctcgcttgtgctggatgacccagaggggcaacttttacagcaggggttccgggccagccagcaccctggctgaaggtgcttttgggtagtcctatggctagaggggagcttttctctccctaaaaatctctctcactagatggatgactggctggcctaacaggcttgtttggaaggacttcctccctttgctgagttattcatgtctctcctcagaagagagtcttctagctctttctgctgaagaaaacctcaactgggttatccctttagtggccatgcattattaccaggtggcaaatcattatctacagattaccaaatgtaagtgcatttgtatgtaaaaatttcagcccagttctctacacgtgttgacacattattgtaccatatcctttgtaggagctagatggtggagtgtggtatgaaaaagtatcaaagtataattttaaaaaggtacaaacttgactcataggataaacatatactaaacttttaatgcactgaggtaaggctggttcagagggaatttgagatactggatgttggtaagtgttgagaaaagaatgttggaatgagattgttgggccaggctgggtgtggtggctcttgtctgtaatcccagcactttgggagggcctgggcaacaaagggagacctcatccctaaaaatatttttaataattagctgggtgttggtggtgagtgcctgtgcttccagctactcaggaggttgaggcaggaggatcatttgggcccaggaggtcgaggctacagtgagccatggttgtaccactgtactccagcctggtcaacagagtgagaccctgtttaaaaaaaaaaaaaaaaaaaaggaaagattgttgagctgaatacaagaccattaatgtcctatagggtagtgaagccacaacctttggggttatcttttctactggaccaaaatctacaagttaacatgtaaccccacagagtgtatgcccaaatcagtagtaagtagcacgtcaggtaagagcaggccccttgagcaggagtctttgggcctgtgagatagtgctccagcacatacctggaggatatgctgtcttcctcttgctttattttcaagttttgcataattttctatcacaggaggcagagttgcctagtgcagtgagccagggtctttagtcccggtttgaatctcagccctgcaagtgtcttgcttgtgtgaccttgagtgagtctctgccttctatgagcattggtttcctcattagtacaaccgggatgacaatggcacccacctcagatgggtgtggtgagaagtacgtgatagaatatgggcatctgataaaaatgcctgtaacatagtaggtactcagtaaaaggttactattattattattattattttgagatagagtttcgctcttgttgcccaggctggagtgcaatggctcaatcttggctcacctcaacctctgtctcccaggttcaagtgattctccagcctcagcctcccgagtagctgggattacacgcatgtgccaccaagcctggctaattttgtatttttagtagagatggggtttctccgtgttagtgaggctgatctcaaactcctgacctcgtggtccgcccaccttggcctcccaaagtgctgggattataggcgtgagccaccgcgcccggcaaaaggttactattattataataaatgaactacgtccacgtgtacacacccataactctgtggcattgtcctctctttgtggcatgcctctgaccttcttttagtaaagatgatttcttctcagctttgatactggtatgctcagtaatcttagtcaagtcaagtcgtggtcttccccataatctaggtaaggagaggatctggacagttttcctttgttttccaagtcaacccccactctcccgagaccttcatcaaacacaaatgaaatccattttctttgtgcagtcagtgtgtctcggcagatgtgagtcagcatcctgttcagaacggctgttggtgccttgccatggacaataaagacacacattttccatggaatgccaggcgcttgagctgacttggggtttccacccgcagagaggaggaggaaactccaggaggctgattttgtggttttggatccagccatcattttaaactgcaaatattctctgtgcttgaaaaatatggtgaatgatttatgggacccatgacccccaggtttctactggcaccttgctgtcagcaacacctccccgtggcattcccttggcaaagctattgcttcggactgactggcatttggaacagtgactgacctctgggggtgcccacgatccaggtgttgaaaatattgttgtagttagctaattagattagttggctattttcgttcaacgagtaaatgcttaaagatttccttgtgctgtttcttatcaggagccaaatacatttgtgtcttggttcctcaccaatgttggaaaactgtaacttctgttagttttgaaaaaaaattgtaaaaaatctgcctggatcacagaattcatgttctcacccatattctgtggggtcaccctatccacatcactcttctttggggagagcctttgcttagatgactttgtgatcactcatatcagacacacgaggaagaggatggaaaagaaagtgatattcaggttttctgtttcttctttatgccctcgccccacccacacagtttctttagaccctgtgcccttccgcccagcaaacacttccttaagcactggaacacgagaggtcagagagtataaatcaagggaggcagagccccatctcctgggcctctggcactatattcaatttagagcttttctggtgtcctggcactggttgtgcattgttgatgatgattgtgctgacataggtattcgaggttccgtccgagtccttcagttgcatcctgggtagaaatggtgagtaaccggatgacccttgcaacctcaacctgtactgaacaatttttcacaggaataaatggcctcaccaattacaatagcagggcaagaggaagcagcagtgttctaaagataagatggttcaatcccatttgcagatgcatgtatttggtattacaatataggacatgacttaagtggctttgactaggcagttgatcctggctccatgattttttcctctttccagttcaatttgaaacatgcagacagtggtatgggagaaatagctgatgcaggtgaggttcttgggcagggcggtaggaggggaatcttctgctggcagaaacagcctccatttcatttctttgtagttagtggcattagcacttgtgcaatgcattacggctgttcacttgtaaagtcccagcatgttagatactgcatctcagctggctgtttgcttggtaaataatttaggtaaaatacattttgattcctttagactatggttgttgctgcctcctaggtaagattcacgttaaccacccaggctctttatggggatctccgataattggattaaattctatcagtgctggctggacacttagctgctatggaaagaagggcaaaaagctgtgtcgttggctaagagtgtgggactgcattgcggcttgtggagtgaactctttagatgttacttcttacctgggttgtttggacaaaagtaagcacttcttttcctaaaattgtagtcgatcctgtacctcacaaaagcagttggtagaagtgacatagaagtcttttagataggtagatttctagagacatttccatttcccaccatggttatccatttctgttggtgattctcaaataaggaattactagggagtttgttgaagtgctgcttcctcggtcccaagttctacagagccttccttagtagttctcaggtgcagcctaagggactgtgtttttaataagtgcttcacgtgattttaatgcaggtggggccaagaaccacattctgacccaaacacagactttgcatttgtttttaagagagaatacttttttatgggtcactgttcttggtatgccttcaggccagcggcccctaggttgacttctggaagtattagaattgaggttagaggatagaattgtattttgtgatggttcttcagtattttcagttgtgggtaataaaattaagtacaaggcaaaacacgttaataaacaagtggttttcctaatagaaacctagagccatagaattttgagagacagagcaagggagcaaacgagcaagcgaacacgcatgtgtgggtaggcatgaatgcacagcagcccaggcacacgtccactttgtgggtattttagagtctttgaatcaatctcttctgcccgttcctaaatgaaacaaaatataagttaaagcttaattatatccattagtgttttgtggaagcagaagtggggggtcattgttcaagcccccttcttgtgcagatatagaagctgagaccccagtaggacaaatgtttacacacataacacatacagggatgggctgcagtccctctgagctttagagcctccacttatgaaatagaaagagaaatagctatcccctcttggttgttatgaggattaaataacatagcttgtcttacgatgtttggaaactgaagagaattatatagatgtaattcctaattaccatgcatactgtgttttctaactgaagtatttagagttatacagggactctcttgaagtgaagtcactagtcgattctggagcaatgactgcctgccactcaccgggtattaaaaaaaacccatttatggtcattatggtgaactttgaaagtacagataatcaaaagaaagattatacataatcccatcactcacatgatcactattaaaattttgatatagagacttctaggtattttcttatacgtgcatacacattttacaaaaatgagagtatacagagcatactgctttgcaacctttttttttttttacttaacagtacctttattgtggatattttccaacattaattaatacttccatgccatcattttaaatgactgcatagtatcccattacatggaaaaaagaacatttaatcagcctcttattggacacaggtgttttttctactttacttttcaatattgtatacaatgctgaaataagcatctttgaagctgaatctcatatccagcaattggatttatttttattttattttattttattttattttttttttttattgatcattcttgggtgtttctcgcagagggggatttggcagggtcataggacaatagtggagggaaggtcagcagataaacaagtgaacaaaggtctctggttttcctaggcagaggaccctgcggcctcccgcagtgtttgtgtccctgggtacttaagattagggagtggtgatgactcttaacgagcatgctgccttcaagcatctgtttaacaaagcacatcttgcaccgcccttaatccatttaaccctgagtggacgcagcacatgtttcagagagcacagggttggggataaggtcacagatcaacaggatcccaaggcagaagaatttttcttagtacagaacaaaatgaaaagtctcccatgtctacttctatccacacagacccggcaaccatccgatttctcaattttttccccacccttcccgcctttctattccacaaaactgccattgtcatcatggcccatccccaatgagccgctgggcacacctcccagacggggtcgtggccaggcagaggggctcctcacttcccagtaggggcggccgggcagaagcgcccctcacctcccggatggggcggctggccgggcgggggctgaccccccaccaccctcccggacggggcggctggccaggcagagcggctcctcacttcccagtaggggcggccgggcagaggcgcccctcacctcctggatagggcggctggccgggcggggggctgtcccccccacctccctcccggacggggcggctggccgggcagaggggtcctcacttcctagtaggggcggccgggcagaggcgcccctcacctcccggacggggcggccggccggaaggggggctgacccccccccccacctccctcccggacggggcggctggccgacccccccccgcctccctcccggaccgggcggctggccgggcagaggggctcctcactttccagtaggggcggccgggcagaggcgcccctcacctcccggacggggcggctggccgggcggggggctgatccccccacctccctcccggacggggcggctggccgggcggggggctgaccccccccacctccctcccggacggggcggctggccggacggggggctgaccccccctcccccctcccggacggggcggctggccgggcggggggctgacccccccacctccctcccggatggggcggctggccaggcggggggctgatcccccctcccccctcccggacggggcggctggccgggcggggggctgaccccccacctccctcccggactgggcggctggccgggcggggggctgacccccccacctccctcccggacggggcggctggccgggcagaggggtcctcacttcccagtaggggcggccgggcagaggcgcccctcacctcccggacggggcggccggccgggcggggggctgacccccccacctccctcccggacggggcggctggccgaccccccccccccccgcctccctcccggacggggcggctggccgggcagaggggctcctcacttcccagtaggggcggccgggcagaggagcccctcacctcccggacggggcggctggccgggcggggggctgaccccccccacctccctcccggacggggtggctgccgggcggagacgctcctcacttcccagacggggtggttgccggacggaggggctcctcacttctcagacggggcggttgccaggcagagggtttcctcacttctcagacggagcggccgggcagagacgctcctcatctcccagacagggtcgcggccgggcagaggcgctcctcacatcccagacagggcggtggggcagaggtgctccccacatctcagacgatgggcggccgcgcagagatgctcctcacttcctagatgggatggcggcggggaagaggcgctcctcactttccagactgggcagccaggcagaggggctcctcatatcccagacgatgggcggccaggcagagacgctcctcacttcccagacggggtggcggccgggcagaggctgcaatctgggctctttgggaggccaaggcaggcggctgggaggtggttgtagcgagccgagatcacgccactgcactccagcctgggcaccattgagcactgagtgaacgagactccatctgcaatcccagcacctcgggaggccgaggctggcggatcactcgcggttaggagctggagaccagcccggccaacacagcgaaaccccgtctccaccaaaaaaaaacgaaaaccagtcaggcgtggcggcgcgcgcctgcaatcgcaggcactcggcaggctgaggcaggagaatcaggcagggaggttgcagtgagccgagatggcagcagtaccgtccagctttggctcggcatcagagggagaccgtggagggagagggagggggagggggagggggagagggagagggagagggagactcagcagcaattggatttctatgtttaccttggctactctaaaaatgagagctaaagttatagatgctacagttaagatagcaagcatattggtatggacttgctttgaaatgagcatatacattttaaaaagttatttatttttatacccagaaattctaactttatactttttgatctaacacacttgagaattcaaaatacttcctctgtcaatctgctgtttgtctttgtctcaagcgttacagttttgacctttctgtttcttcaggactcctctgattttcttcaggccaagccatttgtagtttgcaagtgactttgtaggtttagcaactctactctctcacccaagagttacctatccagttatggcaaagactgtttctttcattaaacaaagttattaatcagtcaggagagagacttttcacattctgaatttacaaactgtgctttcttaagttaaatggcatgttaggagtatttctgatatgaaattggaaacttgcagacaccagaaggcattgcttatctttgtaaatacacatgttccaattaaaataggtactaaaatattttggtggcacctcaaaactcccaatttagatttaatttagattaaaacacttactctttttaataaagttataaaattaattattaaaattgcctattgaagattaaaggcagtggaacgtttattttccttacaaaacaattttgtcttcaataagtgtgattgtgttaatcaattatgctattaaaaatacaactgccgtgttaaatctgactcatttgtcatgacagtttttataattatagaaattatacctagctgcttatatagccataatcctgcaataagtataaataattatctctattaattcagtttgcagttactctctattaaatcccgagttaaatggcaatttggggaccttcatttaaaatcctactaaatctctgttgttccatctgactgccaaagccccacatatgcacctcctactgttgattccagaaaccaatttatgaataaaatagtttttaaaccacaagtatttaaaaggtccatttaagcttgaggtttgaggctctcaagaaaaaaggaaagagagtgtacacattgggtagaggatgctgacgaaagagatagaacaaatcttggtgtctgggtatttcagtttggaaaacagtatataaatttcagtttgaaaaagtctgcttgacaccttctatgtaagcccaaaatactagagtatactgagtaacgattaacaacttgtatttccataggtgtggatgaggtcaccattgtcaacattttgaccaaccgcagcaatgcacagagacaggatattgccttcgcctaccagagaaggaccaaaaaggtacaggcaattccagggatggagggcatttcttgttgaatttttgtttcctcagacattgctttttcttttcatgaattgtggctctcatgcgcaaaagacttgtgggacccttggatatctaagattttcttcttaaatccttgtaagagtcactgcacatgtgtgtgtgcgtgtgtgcacgcgcgcgtgcacctcaggtcatcaggcattaggttctcataaggagtgtacaacatagatccctcgcgtgtgcagttcacagtagggttcgcgcttctgtgagaatctcatgccaccgttgatctgagaggaggcagagcgcagatggtcacgctcgctttagagtgcttgggagctcctgtgtaaggacagtaccctcccccaacccaggctacctggagggagagcttctgggaatagaaagttaggaatagggaacaacaacaataacaacaacaggcaccatttattgagtgcttactttgggccaggcactgtgctcagttttgtacatgtagcaactcatttcatctttatgacttctgctggttcttgataagatgtttctaatttaattttaggatactagcctccactgagtgttgatcctaacaagctcctctcattttaaaaatatacacttgaattcttaagctttttgcaacgagtgggcttagttgttagttcatttggtctgcaaagctatcttcaacatgccatgctcctactatttaaagggtctttgtgtgctttttccctttgcttgtccactagtggttaagaaacaaccagtgcgtgttcgtcctttattttgtcagttgtaggaaattttatttttaaggacgtgctgctttatttttaacttcttgctattaaaagcttttgatttattcttggacagtgcagtaagtgtggcttcctgcagctcccgtttgacttatggctttcacttgtagccacagtggaggtgagctggaaggattctagaagagatatttctgcccttgggattgacatgaccagcagggtcctgggagttgcaggtcaagccttgctacacttccatcccccgcactctaaatggttggaaaggacataaataggaaagcatctggcttctttcatctcaagtgcattaaaattcttctttcactagaagtgtattaatcttgtgtagtgaggcatagaggggagtgttttatttctgcagcttcccaaaggggtctgtgagctggtagagccaagttcccagtggagcagaaggctcatctctggatagcaagcaaaaaatttgatctttcagctgtcacagagtatggtcttggaatacatttgggtgtgtacacacacacatagaagcctgaaactttttttttttttttttttttttttttttgtgacagggtcttgctctgtcacccaggcttgattgcagtggtgtgattcggcttactgcaacttctgccatgtggactcaaatgattcatctcagcctcccaaactgctgggattacagtcataagccaccacacccaaaacctagatcttggttttagattagatatatgtagaacaaagctcccacataccctctaggagggaagatattaccagaattatgatgaggtcccaagatctcacaggctttgctgtgtgctggggacagctcatcatcctactaattcttgactctcagccttaggccaaggagaattatgtatcttttataaaagatatgtaaactacttgagatagtttcaagtgaaacaatcggctgtttgtgaaataaagaagaaaatttgtgaaataaggaagatttgtgctgcagagttctttagggatacgggctgcagctgcccaggtgatgagcttgaagaacctaggcccggctggcagagtggagaggagctgggagagacagctgcttttacgactctttcatgttctagcagacgccagatgcgaggcttctccttacagggaagggttatgtttgatttatcatacatttctggagtttttgtttagtttttgttaaatgcaaagctctgtgctggacattgtgagaaacaggaagttgaacgcccataaggagtttagaatagaagtggaagaagtcagtaggtgcccaaatgctatttgaggtttgaatagagaatgggtagaggggagtgtcaagggtaggctaagtttggagttacctaacctcaaagttccaaactgggagactggtgttataattgggagctactgcttttacagtcccctcctaagtgccgtgtgttcccgggacattgggaagcaggagaaaatgggtggtgaaagccaggtggcttctaagatccatgtcagttctaacacttttgacatctacgaatgattcagcatggttgtctctgaagcatgctgcaaatcacctctcgtagcctgcaagtacctgtaggggctaagctttgtagatgccacaggtgctcttagaaagcaaggaaagaaagaagagagagaagaaaaaaaaaaaagcgaaaagaagaacattatttcagtaggaggcttcagtcatcagccatgatttgtaggaagtttagctcgaggaagcatcgctaaaagacacattgagttggggtgtctgtctacatacatgggtgctgaccagacctctgacaaatttttgtgttcatggtgacagtggatccaacccttaagaaattacatgcagcagggaattcaagggggccagttcgggggtgttagtttcctatcacttccattaaacaccgtccgagtttggtgtggacaaggagatattttctcagtattagatgaagtgttttgcataggaaagtttcatgacctcacttccaactgtgttgcggcctctggttccttctggtgactttgaggagctgccgctggaatggctgcccccacgtcttttacagtatatcgggaggccacaagatctgcttgccaggaggctgtctgctcaaacatctccttcttagcaggggccttgatctccgaaagcgtcctgccttccacggagtgttactgctttcaagcatattgcaaagtgcctgcactctcacagctttcttaggaatcacatacgactccagtttccttttattgaccggggaagacggcaaaattaacttggattttaaggaatttcgttgaagcaaagcctgatgtttatgtttctgagatgtgggtctgttgaagggaatgcagttgagggcgtttgacccaagactccggagtggtcaaagactcacaacctgcttcacaaaaagatccctcttacttttgttttactcactagttttaaagtaaaataaatattttccttatgattgcctgttatcttgaaggaacttgcatcagcactgaagtcagccttatctggccacctggagacggtgattttgggcctattgaagacacctgctcagtatgacgcttctgagctaaaagcttccatgaaggtaaatgcatgtgagatgtcatctctgtcaaatctgctattaattttgtgaattacagctttctgagtgtaatttggtgattttcagttttgttgaattctcatttggaaccattttttaaaaatgaactgaagttatatgtctcaggatttgtaccaaaaatatttcaattacttgttttaagactgtaaagaaatttcatgatgctgagaagtcagttaccagctgctactactcagcacctgggcaattggaataccatttgggaaaactacttccttgattacacttcctcctttaaaaagatatgttgtgatattaaggcaagaaaaaaaaactcatagcttttgttaagtgaagcttgcaaattctgcccatcctttcgtgggtgtttcttcctcccatactctctctgtcagtaccatttgtttcaaattcaggcagaatcagaacatcatagtgcatataaggggtaattctggatgaagaatcgtacctgaatcgtacctgtgagaaagtaactgtgaagtctcaatgcacgttatcttttatgtttttcttttgtaaagttcttttgaacctggaattttaggttaaattaagtaaaaactgtagattggaaacctcctgaactttgtgcatacttaaaatatcaagttttttgttttgttttgttttgttttttgagatggatttcgctcttgttgcccaggctggagtgcaatggcgcgatctcagttcactgcaacctctgcctcccgggttcaagagattctcctgcctcagcatcccgagtagctgggattacaggcatgcgccactacgcccagctaattttgtatttttagtagagacgggatttctccatgttggtcaggctggtctcaaactcccgacctcaggtgatctgcccaccttggcctcccaaagtgctaggattacaggcgtgagccaccgcgcctggccaacatcaagttttatataaatgcaatagatgcacacacattaatgtatgttgtactgcaacacatttggacccttttcttagtgtgggtctgcagcatttgaacagtccgacactgccctctgctgatatacatgggtaaagtctgcgctgtagatgagggaaaccattggtcttgattttttattccgagtctgttttctctgatgccactgttcctgaattatgaacagtctgagctgtaagcctgtcaccagagctaatgtcacagttcagttgtcatccttttcccagagaacacaagagtgagggtgcttcggacactgggcatctccaaagcctggaatttgatagctcagggctgctgtaagatttgttgttaagtctctttcttcctttagttcttcagcttagcccaagctgtgctcagtttattttagcggacttgtctgagtttcctaagtagactgtactgcagaaaagacgtcattaagaatgataaaatgtcgacaacatttcatgatcctggttgataaaaatagcgctcctgaaaaccgagtctgtggacctttggaggcagggatgagtcagcctctcctaggtttcttctgaccatcaacacttcagatcagtttgtcttattttcatcaagaatctatttagttgtgattcgagtggctttactggtatctattactaggtattagggacttgaaacagacctttttgagctgtcagtcactgttgtaatctatgtaattgggcccaatggaaggtgctttaactgctgaagctttgaccctgtgccagctcttccattagctatcacagttgaatacccgtccaaaatccataaagcttgaagtgacattaactgaactatgcttaaaaaaaaatctgttttgacttctggcagtaccggtggcagtatctgccatatgttacagtagaatttgcccttgtgataggaattgtggacagtctgtggagagtttgggccgggctttggaaattgccaaggtcacctttgaatgtagacataaaaacactattggaattctcagatattaccactggtatatcagtgatggaaggaaacacatcttacattattctgcctgtcttgcaattctacaatgtcaggatataacatttctcccactgtgtgttatttttagactatatttctatcatccttgagattgaacaactgcctctcaaaatattcaaagatactcggtagtcatttaataacatttgtgtagaatgctgtatggaccttttgctaacaaggggagaatttttggctttgctggaacctctacaaatcatgattaaaaactcagaaagaagagccattggctcaaaggttagatgaagaataaaattcaaaattaaccattaacctgaggcttagcttatattatacaaactactttttcggggcatataaacgctaataagtttaattaatagctgacacgcttttcatgtgggtaagtttcttattgtattaacaccttataattgatttacattttaaacagttgtaattctacttagttcaaagtgatagttccatattcggaaagacaagtattaaagaatcctgattattaaatcttgactttgatcatgaagccagctttgaaatacatgtttcattgagtcctttcaagctatctgacatgctcaaaagtgtatatattaaatttgaatacatcacccatcaaattcttattccttaataaagtgttggtgtctaggtttatttggcacttcattatttctttttgcttccctaaagtgcctgaagagtgcataattatcaagcaaaaatggaaggacaagaatgaaatttttaacattaacccaattttacatttcaaagagtgcagctaaaaattttttcttaactatacctttgcctggtaaaaagacttactctaacaatgctggctgcaagtgacaacataaaatttctgtattcctttattttagcgagaattgtttaacaaagaaatttctaatctgttaaaatagtgagtggttattgtagaaagtgaaaaataataataagaaaaagttactttatctacccacagcaaaaggcaattgccagttttagtattttggcatattctattgctgcctcttcctattcactacttttttttttttttgagatggggtcttactctgtcgtccaggctggagtgcagtggcgcgatctcggctcactgcaagctccacctcccaggttcacgccattctcctgcctcagcctcccagggtagctgggactacaggcgcccgctaccatgcccagctaattttttgtatttttagtagagatggggtttcactgtgttagccagaatggtcttgatctcttgacctcgtgatctgcctgccttggcctcccaaagtgctgggattacaggcgtgagccactgtgcccagcccctattcactacttaaaaaaaaaaaccatattaacagttgaactccaacatgccagttccaccatcttgtgctctggtgaagcattttttaaaggaatagaaaatgccattactttgtgctaaggggtaggagtatagattcttcagaaggaatgtagaaagcaggatgctaacagacccaatccatgtttgcaatttacttgatggagatcagagaagtaggctaatggtggggaagcatttccctgctgatgttcgtgcttcctggttcacaggggctgggaaccgacgaggactctctcattgagatcatctgctccagaaccaaccaggagctgcaggaaattaacagagtctacaaggaaagtgagtagcttgatttctgtgattcatcctctcagcccaatttatgtgactctatcatggccactggggttagggttcgggctaagatgcctgcattagtgatgtgcagaagtgcctgccaccttgactatgcaggcaaggttggctgtggtccaagtttctctccttcacctcctcattgcctgcattttgattattacattccactagaacttctgtgttagaagaagggtagacaggagggaaaggagagaaaacaaaacttgtttttaaacaagatcggatgaggagaagtagcaagtattatatatggattccacttattgggcgctgttcagtgtctgctcaagaggttgccaactctggactgtggataattgaagaattacagcaagagacccctgtggactggtgcacacttagcagtatagaaggctatgaggggaataaacaatgcaacttacatcgctactgcatttcttttttgttttactttttaaagttattatcatagttttacatattttgggggtacatgtgatattttggtacatgtattatatataatatgtaattatcaagtcagggtaattgagatatccatcacctcacacatttatctttttttttgtatcaggaacattacagttcttctctagctactgtatttcaatatagatgctattttgaatattgaaatatactttcattcaaaagcattgtttaattcttagtagtttttgccgctgtgcattttctcagtggacagtaaagcacaattgtgtgtgtgtgtgtgcgtgtgtagacctccaatttttttgatgttcagaacaagtactcacagtcaggagggctgggagccagtatttaaactacacgagaggtcaccaatcaacggtgagcctgaggatccctgatttgatctagccctgctgccccctgttatggataataactctggctctgatttcatgagggcgaaaatcattctagtgaatccttcctctgtttggggttaaggagaatggatatgtccagctgacgtagctgttctgcttctcagagtcttagtgggaaatggggagattggggtggatggttggctacacaggcagaaagcataaaaccagatgtattttcctccaagtgtacaagactgatctggagaaggacattatttcggacacatctggtgacttccgcaagctgatggttgccctggcaaaggttggtttcccagtttctttctttgcccttgcttcctcccaaggcaagtcacatacctcattttatacttggagtgaattaactaaatcccctgtgcctgcatcagaaattcagctgcatttttgaaagtgggtttgcactgtcactgcagagttgtcaattttgtataataggatttcttatcctgcaaaacctcatggacaagtggactttgggagccagagaagggatgggcggctctcaagtcctggcctggatttatgtgccagagccttggccgtgtgacttagggaaggtcactttgcctctatctgtggtcatgcaggacccagtgggaagtgaccttctggtttctttttcactgcgtttacttctcatggaagaatttgcccatatagtcctttgtctggggtggagttgtctttgtggagctgattgctaatattaacacattaacatggaggaaggggcatttcccctgtgaatccctagttctggccagcgtgtagcttaatacttatgtgccaggggagggacgagagaccctgggaaccctgatgacaaatgacagatagtgcgtccggcccactcacatctccattactgcaacaactcctatgccattctccctcgctctcctctcttcgctaccacctgccccatgtaccaccatccacggatctctgtgaaatacactttcaccattttactcctctgttcaaaccccatttctgctgcatcaaatttaaactcctaactgctgtgaaaggtcctctaaaccctccctgcatcttctttgctcatctttcccgctcagctctgctctgacagggcagctccttacttacctgagagcgtgctgtgccatcccttgtgtgccagctggctctcccgctctgcttggctagctgcatctgactgacccttgaagtttcagcttaagcccaggcccatcgttcacactctttgctgactctgccctctgagagttcttcctccgcccgcattttgtgtctttctagtgctgtgggttcccgggctgctttacatttgtttccacatattcctccatctgcattgcaagctctctgtgagaaagagctaaatctcatcagctttttgtgggggatggggacagggattctgtaaggtgtgtaggccaggactgggtatcaagggggggattgttgatggcaaggcacagcccccacttccttgctcaatgattttaccactccttggctggtctaggtttctttttctttttcttttctttctttcttttttttttttttttttgagacagagtctcactctgtcaccagggttggagtgcagtggcgtgatctcagatcacagcaacctggttcaagcgattctcctgcctcagcctcccgagtagctgggactacaggcatgtgccaccacgcctggctaatttagtagagacagggtttcaccttgttagccaggttggtctccatctcctgacctcgtgatctgcccgccttggcttcccaaagtcctaggattacaggcgtgagccaccgtgcccggccccatctatgtttcaaagtaagaaaaatcttacgtggttacttatttaggaaattaaataatggcgtacatggactggggagaaaacattttcagttttaaaatacacaaagaaatgtatttgaagttctttttctttcccccatagggtagaagagcagaggatggctctgtcattgattatgaactgattgaccaagatgctcgggtaagtgctgagctttttgctttgagtttttgttttctggtaagtctctggatagtctatatagtaatttaactctgtgtgacaaatgactcccaaactctgtggcttaaaacaacaaacatgtattatttctcagtttctgtgtgtcaggaattgaggagtagattagcccaattgttctggctcagggtcttttctgaggttgcagacaaaatgttgcatggctgcagtcacctgagggcttgactgggtcaagggaatctgcttccaagatggtgcacttcacatgactgttggtaggagaccttagaatcgctccacatatgcctctccatggggttgtttgagcgtcctcacaacatggcagccggctttccccagagcaagcaatctgcaaagaggaagccacagtgtcttttatgacctaacctcaggagtcccaccttgcactgctgtcatactcttttcattaaaagtgagtcactgagtctagcccacactcagtgggaggggattaggctcttcctttggaagggaggaacctcaaagaatttctggccgtattttaaacccaccatagtctgacagcaatgtttattagaagacattctcttataatgctggtgttacttacagaatcaatacgtgactcacatatgctcactcaggctttgcttgtatggaagcatcagtttctgcagagtgtaatgtggctgtgcataccaatcaggcaggcaggtgggaagcagaagaaggtggaggagacacagccagggacaggatggtgtactgctctgttgtggtgggggagaaagggaggccagcagagacctgtccttttctggctgaataagacttttgccagttctagttccattatctctgagaactatttgttaagcttattcagactgcaatgaactatattctttactcagagggacaacgattatctcaaagtaagtcataaaagctgcagaaaaaaattaatttaaattaatgttagttttaaaattcaatatattccacacggcacttctagcaggtagtagagaagggttttaaataaagtaatagaagttgggttttgcagttcctagatggtggaagatcacggaatgaatatctacccttgcataagcctttcttcctcttgccctccctgccattgttagggctacttgtagcccctaaattttccagaaactgaaagtgagatgagatgggctccttttccagctccatcactccctgagtctctgagaagcttgagaatgagagcctggtctgtagctgtccagtaaacatctgctagcttatctgcccctaaatgtgcccaaagggaggagggccagatgtgttaatgaacatttacttgttcttctttatatgaatacaagctcttggtccctcctttcttattcaaggaaggagattgtacagcagacctcacgaactatctgcagtctcatatggtatccatctgtgcctaaggaagactgcttgtgattaagacttttgacctaaatagtaggtctctgcccatgtctgcagtataatcatctttcctcgtttggcattttgaatgtgtagctttttttgttttttttgcatgacattttttttgacgttacattggatgtgtagttaacttttcctggttggttgtactcgtaggatctctatgacgctggagtgaagaggaaaggaactgatgttcccaagtggatcagcatcatgaccgagcggagcgtgccccacctccagaaaggtgggcactgtgctgagggagtctcagtgccttggggccctggctggggcggctgggtggatgtccatgttgggatggagtctgccagaatgaggttctgtctccgcttggcactctcataggctcacccattttccctcacctttctctcccattctggattcttttctcttgcaaatagtttctgcatttggtgctttattctgcagctccttcttgtttgatgatcatttggtcttgccattatttgttgaagtagtggactttggtgcatgctctgtactgtttcctatggttttcggatggaatgggttccactcaggggagatagagatggtccaaatatgtggcctgggcagtgccattcaggacaggtggtatggctgttccacgacaaacttggccaatgttggctctggtcaccgtggtaacctctaagctcctaggatgctgtgatcatcctcaatttttaaaaaaattatggtgcataaaactaggtgggtgatcgttgacagctttgactagtggctcggatctgataactctttgttgtttttcctcagtatttgataggtacaagagttacagcccttatgacatgttggaaagcatcaggaaagaggttaaaggagacctggaaaatgctttcctgaacctgggtaagtgaatgtggcccccattcctggtagacatcagctaccagagcagaagtgacagatggccatcctgttaatccaaatgtgtttgggaggtgtggcttctatgcatgctttggatagttttacagtcttaattgtatagatttcagaatataaaactgaagaaaggcctaacttggtaacagattgttgccagggaggagtaagagaacaggaggagagaggggtgtgttgtggaaactcacgtatgcacttgggttctgcaggcctcagagacccctggtttaaaaccgtggtggaacttagtattgcagaggatttctagatttcccttagcctgtcctattttgcagcccttttccattgcattaggtcacttctggtttgtggcccagggccagggcatcctctctcattggtagaggagagaccagagcagctgcagcgctgactccctttcttctctccacagttcagtgcattcagaacaagcccctgtattttgctgatcggctgtatgactccatgaaggtaagggcagctggctgagagagctgtgtttccacactcagcttttcttcttttgggtcccaaattgagtctccttgattcatggatggaggaaggggaccccactgtgtggatgcaggaacacactagtcagctgtggttgtatgtgacagctgagagaaccacaaatctgtcttctttctctcagctgcttgaacatgtatttgcgtacagacaaaaagtaaagtgccatgggagagagaaaatgcgacatggtagtcgtgtctgatccctgcttaggtttctccgtgatttcttcctgttactgccagagtcaagacaagcgaggaagggagcgattattaagcacccactatacagtggacaagtgctactattttaccttaaatcattgcataacaacctctgaggcttatgattatcttctttataaatgcagagatggagctcagaatacctcagcctgcttgaagttacacagacagatttgaacctgggtctatcagaccccaaagacagccccacaacccttccctaaacgaaccacctcttcccgtagacccatcccattttctacacctcaagtgtgccatgtgttttctggcttctaggcttttgcattttccttctggaacatctcccttgtctgtgctgcctctgccatctgtctttgagttccatatcaaatagcaccccttggtgccttcgctctgatgctctggaagtaaactcagtggtctttattgcacatatcattagaaatggcacagagcgatgatagaaatgtgttggcatgttccctctaagcctgcaagagtcaggaacctcttgttacatatggagactcagactgcttgaactgagccttgcagtagtaggtgctcagtatatatttattgaatggtggcatagagtgggagtctgtgctgactacagcctggtgtgtttggaattcccagatgctcttctttcttttcttttcttgtcttgtctttttttttctttcttttttcctccctccctccctgccttcccctgcctccctgccttcccctccctccctgccttcccctccctccctgccttcccctccctccctgccttcccctccctccctgccttcccctgcctccctgccttcccctccctccctgccttcccctgcctccctgccttcccctccctccctgccttcccctgcctccctgccttcccctccctccctgccttcccctgcctccctgccttcccctgcctccctgccttcccctgcctccctgccttcccctgcctccctgccttctcctgcctccttgccttcccctgcctccctgccttcacctccctccctttccttcccctccctccctttccttcctttccctttccctttcttctctctttctctctccttccttccttccctttttctttctttctctctttctttctctctctctctctgtctttccctctctctctctgtctttcctttcttataggtttttgggaaacaagtagtgttcggttacatgaataagttctttcgtggtgatttttgagattttggtgtacttatcacccaggcagtgtacactgtgccctaatatcccttatccaaaatgcttgggaccaggaatgttttatatctcagatttatttttgattttgtaatatttgcatatatatgatgaaatattttagggatgggacccaagtctaaacttgagattcatttatgttttatatagaccttacacacatagcctaaaggtaattttatacaacgcttttgataattttgtgcatgaaacagtttgtgttaagtgctgtatgtggaatttttcattgtggcatcatgtcggcactgaaaaagttttggattttggagcattttagatttcagattttcagatcagggatgctcaacctgtagacgctttctttaacgataacattctcagcgaatgtaacaaatatcaacttgattttcagggcaaggggacgcgagataaggtcctgatcagaatcatggtctcccgcagtgaagtggacatgttgaaaattaggtctgaattcaagagaaagtacggcaagtccctgtactattatatccaggtaagcccgaggtgcagtgtcagcctgccctgccgtccagagcaccccgggccctggcaggtggcctggcagaatgatgacagagtggcgattttctgttttctgactctctggggaagagatgctagtcatcaactatcagggatttattttgaaagcaccatttgtgatttgtcctggactttgtacaatcaggcagatgttttatatttttcacatctgttactctacaatgatcatcggtgttcatgacgatgatcctgcaaggcttgctgacatcccgaagaggcttggaagatcagttacattttacttttttttttttttttgagacggagtcttgctctctcgcccaggctggagtgcagtggccacaatctcggctcactgcaacctccgacttctgggttcacaccattttcctgcctcagcctcccaagtagctaggactacaggcgcccgccaccacacccggctaatttttttgtatttttagtagagacagggtttcaccgtgttagccaggatggtctcgatctcctgacctcgtgatccgcccgcctcggcctcccaaagtgctgggatgacaggcgtgagccactgcgcccggccacattttacttttattatgcattggttccttgaaaaatcctctgggataggcctaacaactttcagttattcagaactcccatctctccaatcagtttagcatctgtctgttttgatgtgatgtcgcatttgcagtaaggaagtgatggcattcacagtggtaccactgtgtagatttcagacagcccttgcaattcccctttctagaagttcctcagatgtccaaaggcatgcccatggttagcaaggataaagttagagctggattttttgtagccaggtttattagggcacatgtttaaagtcaaaggaccagttagactcttagtaattgttcctcacctcaccagcttatttccacttgaccttaataatgcaggaaataggagagtgagctaggaaagtaccctgttttctgtggaaagacgaggacgagagaggaaagttagggtgtttgtaggaccttgctgcagtaagaacagccctggtcactaacctatgtcaatcctcagcaccttgcactccctccaccccacagtcctaaggagccttgagtgtcttccccagcacctcctccgaccacactcctggaggcttccctggcaatggtttgggtgtggccttccaggcctttgtatcagggcaggtctcctgcagagtcttctctttgtcatgggagaagcttcattgtgcgttgaggctacttctgtgttattgaggagtctgggcttttttctgataccacgtttcttttctttcctgggccattgtagcaagacactaagggcgactaccagaaagcgctgctgtacctgtgtggtggagatgactgaagcccgacacggcctgagcgtccagaaatggtgctcaccatgcttccagctaacaggtctagaaaaccagcttgcgaataacagtccccgtggccatccctgtgagggtgacgttagcattacccccaacctcattttagttgcctaagcattgcctggccttcctgtctagtctctcctgtaagccaaagaaatgaacattccaaggagttggaagtgaagtctatgatgtgaaacactttgcctcctgtgtactgtgtcataaacagatgaataaactgaatttgtactttagaaacacgtactttgtggccctgctttcaactgaattgtttgaaaattaaacgtgcttggggttcagctggtgaggctgtccctgtaggaagaaagctctgggactgagctgtacagtatggttgcccctatccaagtgtcgctatttaagttaaatttaaatgaaataaaataaaataaaatca

SEQ ID NO: 44 - DNA, 58678 bp, Homo sapiens
  source 1..58678: mol_type = genomic DNA
agcgcggagcacctgcgcccgcggctgacaccttcgctcgcagtttgttcgcagtttactcgcacaccagtttcccccaccgcgctttgggtaagttcagcctcccggcgcgtccccgcgagcctcgcccacagccgcctgctgacgggtggcttggggaggtcgcggcgcctcgcccagttcccccgcgagtgcagctcgaccctgggcagggctggcggctggcgcccgcgcccggccccaacccagctgcgtgggtggggagctggagggacctcagtcctgcatttcagagtcgaggagactgggcccacgggggggaaagtgccgtgccatgggtgggtcacccaggtcttggtggggcccaagctgatactcagctgtcctcgctccctgaaagcttcgcttattacagctagcagcgtaagggatccacttagccatctcggcctccccagtcctaaaggtctaggggacagaaaaaagctgggagtcggaaggttcctcgggtccccggcatggcagacggggctggctcagaggtctgctctgtggacttggaatcgcacccatcctgtgagcatcttctccccctcacataggcaatttattttattttacttattttttttagaaggtagaaaacagtggatttgcatattgagggttggaagttcaagaagtttgctttttcctgaaaagactaaccgttttctttgcaacagaatcctattgactagatatgaatcattcccttggtatttgagtcaccaggtggaagatttggatacttgattgcagatgaccatatataggaaagtatgcaggtgctgggaggttctgggtcgctggaggcccctctggctactgatacgaaattgcatagcccaggccgaattctttccaaggatttgtgttcagcactgacagcaagaccctgccctccgggaaagatacatttactatgttcaccaacatcattttttaaaatgtaactaattaaaacgttactccatgaagataccacctttggttttcacgaagacggaaaacttcagactgaccagaaagggaatttttaaatgtaaagaaaaccagaatcttgttcccagaactctgtggttgtgtagagaaacctgtttagaaataaccgtagaggaggaagtaaaaggaaatgatgtaatccctttcaggaaaggatatattgaaattctgtttaagtcatttggccttcgctgtggagtaattctttacatcttaaaagttaaatgatagattagtaataattcttaataattttccagttctgctggatcaatgcatattaagtgtcagatttggtcaggtgtgggccaggcagcagattaaggcagaagcatgggggttaggttcatacctttagagtctagctgcctagatgcagtaggggtccactcactagctgtgtgactgtgggacattaccatacctctctgggctccagcttcttcatatgcaaaacgaagatgtaatacctaactcactggatgattgtgcggcttgtattaaatcattcatttaatcaataagttttttttttaaatatctaccgtgcaccagtgcacacagataagaagaatctccagccctgtgaaactgacctcgttcaatgctggcaacacccccttcttcactttttacagatgaggaaattgaggcccaaagaaattgtgtttagctttaagaggcaaaatgagaaccaataatgccttgttttcactgtacagatggtttgacttctgatttttagacttcagaatagtttatctggctgtaacccctcataagtcaaagagcatgtatttagagagatgcagtattagactctaactggagagttgactgccctaggctacagagagcctgaaaaaaccaaggtgaaatatttccagagactaatagtgtaatttcccattgaacttttctctgggggtgtcagggaatttttagaatattttgttcccaggaagggtgggagcaacttgcatttctaaatcaaccctggagatatgccagcatgtttgaataatatctatttaagaaaaatgtgtctggcttcccaatcaaagaactgtgcctttcacctctgcaccccaccaaggactggaccacctcctcaaagagcagatgtgtctttataacagactgtaggcttggagccttgtaaaatgtacatggagtttcacaatcaagcacaaggaatccaactgaaggcagctaaactttgtgttgatttggtgaggaggagtaaaatcctgtgtttttgttgttattgatccccgtagtggtagcctgtcagtaatcagcagagttctcctggactttaaataagtcaaaaattggcttttcaggaagtatatttgtaagcatcttaagtacaaagatttttttctgtctcttgtcttgaagtcctcacaggtctagcacagtcccttgcatatggtagatgctcagtaaatgtttgtttagcaaatgggatacccaatgtcagatatatgctcttcctgagaaggtttttctgtgaatgttgacatctgttttctggattcaagattaagggttggactaagattattgtgttctgaatcacatattgataccatttactaattgttttcttttaatagattagtgtgatctcagctcaaggcaaaggtgggatatcatggcatctatctgggtaagtaaaaattaagccttcacaacacagtaacatatatgagtcaaaccaaaacacagaaggtcaagatagcaaggaaaattttaggaaagtttttaagtttatctggcaaaattaacatgctagaaaagccagaggatgtcaaaaataataaaatatttttaaaaatgcattgtaaagttacatagttaaaataacttatgatgacaccaaggcggaaaggtcaaaatcagataataaatttagtatataatttgggaatttattatatgaaaaagatgacatatcagagaagaagagacggattattcaataaatgttaggaaaacttctagctgtttggggaaaaagtaaatctgtattcctttttctccttacaataaaataacttccatgtggataaaatacagaaatgaagaagatgaaatatgaatgggccgggtgtggtggctcacacctgtaatcctagcactttgggaggccgaggtgggtggatcacctaaagccaggagtttgagaccagcctggccaacatggtgaaaccgtgtctctactagaaatacaaaaatagcccggtgcgatggcagatgcctgtaatcccagctactcaggaggctgaggcaggagaatcgcctgaacctgggaggcagaggttgcagtgagctgagatcatgccactgcactccagcctgagagacagagtgagactccgtctcaaaaaaatagaaaaagagaaagaaatatgaatggattgaagaatattcttggagtggggaagatgcttacaactgtgacacaaaaccaaacgcctaaaagaaaaatattgatctattttaactacatacaagtttatcactatgacagccaacaatcccattggtagaggcagaagacagctcgcagggaaaaaatatttgcagcacattagacaaaagacttatttccttaacatacaaataacttgaataaattggtttaaaaaatgaacttgacagaaaaagttgtaagggacataaacaggacataaaaagaattataaatgtccaataacatcagaaggtgctacaaggttggacacagtggctcacacctataatcccagcattttgggaggccaagatgggaggatcatttgagcccagaagttcgagaccagcatgggtaatatggcaagacccagtctcttaaaaaaaaaaaaaaaaaactttaaaaattagctgaacgttgtggggtgtacccatggtcctagatacttgggaggctcaggtggtaagatcgcttaagcccaagaggtggaggctgcagtgagccatgttcataccactgtactccagcttgggtgacagagtgaaaccctatctattaaaaaaaaaaaactcctgcatctcagaattgaaaaaaacataaatatcatgatgagaaacacttttctacttaagagattggtgaaggttaaaaaaaaaaagtaatgtagaggatgtggcaaggtgatatttttattctctgttcatgggagagtaaatttggtacacttttggatagtattttggcaatatctctcagtccttaaatgcacatgtcctttaaacccagtaattccacttgtgggtatgtatcttatagataaacttgcataaggttgaaaaaataggggcccaagtacatttgtttgtattaatgaaaacaaacatgcagacagcataaatgtccatcgatagggtaggaataagtaaattactcatttataacttacaggcatttttatgtgatcattaaaatgaatgggaaaaaagtggatcagctgtatgtgaattgacattaaaaaagtcccaagatgtaataatttaaaaaatcaacttatagagtaatatgtacagagggattctgtttaaaagaaagaacaaagaaaataaaaaatttacggaaagactattacatcaaaactttgtggaaaggtggaattgtgagaaaggaattttacttttcaatatatcaccttctgtactgtttgatttttttttttaatcatgagcatacattatattttataagtaaggtggagggcaagtttaaagaaaagcctgtgcagagatgtgaccatcccttggcctggcgtatggatggaaggtgtgctgttggaaggctttgtttggcccaagttactcccttctcactggctaggaggctaaactctcatctttcatctgaaatccctgctgcttttatgaacatatcatagaatcagatgaaaaaagcatctctccaaaatgctggtgttaaaaaaaaaagtcgccctctggccctcgcccatgagtaaattaacatggaattatttgggcaggctctcctgctgacaccttcaaaggcgtggcacatttctgaagggctaggagagacccaagtgcgtgtgatcaagggtgtattcatttcctattgcactatgacaaattatcataaatttagcaatttaaaacaacatccatttattatctcacagttctatatgttagaagcctgaaatgggtcacacagcactaaaatgaaggtgttgttgggactgcattcctttctggagactttgggaagaatcctcttccaagcccttttaggttgttggtagaatttagttccttgtagttgtcgaattgagttcttagtgcttgctggctgccagcagaagctgtctttggctcctggaggtctctgcctgtccttgtatgtggcccctgcatctcagaaccagcaatgatgcatcaaatcttacttatgcttggaatctctttggcttttctttctgggggatctcttttctgccattctcttctccctccagctgaagacatttctctgcttttaagggtgcgtgtgattaaattgggcccacctggataacacgggctaatccctgtgttttaaggtctggaaccttaattatgtttgcaaagtctctttcatcatgaaacacaatacattgacaattcccaaggattatgatgtatacattttaggaggctgttgttctgcctaccacaggggctaggagtatggctacatcagggatggtagcatttggcatcagatagcaggaaagaggtggggaggggccaaaaacaggaggctaacctgagcctggagggcaaacccacacgtggagaaagaggccctagccaaagaagggctcctactgtctctgggtttttctttttttttttttttttttcctgtttacctcctctccctcaattaaagaactaatacttatgagtggctcagagagcaaacattaggaacaactcagaactgctatggaaaacaagatagcaattctccaaaaaattaaaactagaactaccacatgctccagcaatcccatttctgggtatatatccaaaggaaatgaaagcaggatcttaaagaaaggtatctatacacccatgttcactgcagtactttttacaatagccaagaggtagaagcagcccagtttccattgacagaagaatgaataaacaaaatgcggtacacacacacaatggaatattattcagtcttttaaaaacacatgttgtgtgagaggaagaaaaccctgtcacatgctactatgtgggtgagccttgagcccagtatgttaagtgaaaaagccagtcccaaagagacaaaatactgtatgatttcattgataagaggtatccaaagcagtcaaattcataggaacagaaggagactggtcgttaggaatgaataaggaaagagaaaaagaggagttgtttaatgtgtagagtttcagtattgaaagatgaaaaagttctgaagatgtttcaaaacaatgtgaatattctaaccactactgaactatacacttagaaatggttaagatggtaaaaaccctcagatttccaattgtaaacattcttatcacaaagttttatgtgttctttttttctctctgccacacaaaaccacatacacactcaaacataaataagcaatcaagtcattgcatttctacaaaactgtatacgtgattatgtgtatgattagtttattacagtggtatgatcaagggagaagtcattagttgcaatttcaatgcattaccattgaagatgaaagaatggctggtttcttaggtcttttatattctatctaggagtgttgcaaccctaccattgtttcagatgaatcaacaatctatgttgcattagtatttcctttgtttgcaaattttgaatatctctgctcagacatatgttctaccacttcacccttgatgaaagggcctgatatcttattggtttgtactccttggacttagagtcccttgtcatatgttgcctgtaggtccacagcaagcactcaggaagcccacaaattagaatgtcttagaacgtgactttttattaagctaccacagcagtattttttctgcgtaccttctgttatacaatgctggctttcttaggtaaatactctgagctctttcctccttgatcaattcctaacttacatttacagaataataataaatgtaattcctattagtttgaactctcaaattagaatttttattatggtactagaatttttctttctttatttctttatttttttttgacagagcttcactgtcattcaggctggagtgcagtggtgcaatcacggcttgctgcagcctcaacctcctgggctcaagcgatcctactgcctcagtctcctgagtaggtgggaccacaggcatgcccccaccatgcccagctaatttttaaaatttttttatagagatgggaattcactgtgttgcccaggctggtcttgaactcctgagctcagctgatccacccacattggccttcggaagtgttgggattacaggtgtgagccaccacacccagtggtgctaaaatttttttaaattaactcacaatcattgtaatcaccatgaactgttagtaacatcctaacttgggatacattctcctttcaccactccaaactctaatttacaaaatgaggaaagggaatatagagctactctgcaaccaagggataagagaagttttataaaaatatattacctaaatacaatgcctactaactttgttttgaagttcatccaaaacagttaaacaattaaagcagcaagtacctagtgcgacaggctctgctgggagcagaatgaagacagtctaaccaaaattgtaactctccctttcagaactccctaatcatttaaaaggtaggctcttgagcaaattgcttagtctttctctacttcagtttcctcatctataaaacaggtagggtaatagtgcttatctcatctacggtttgtaagcattaagccagttcatgtaaaatgtattagcagtgcctggcatggagtgagcactcaataaatgttagttttaatcagcatgatttcaatatattaattttattctaaaatgtatttcttgccaaataatatcgctgcaactgtttttgtagaggggcttctgcctatttcctgggcctgattttattacacatcaatagccccctctccccattggaatggttctttcagccatctaaaagagatgtcatgtcctcaatcagattccttctgaccactcttgttttcaatattttataatattttaaacacatatatatttctaaagacataaaatactccctttccactcctagtgggcatactggaatacagttctgacactaactacccagcattagcatcagattccacaggattaagggttcagtcctctgcaaaactgccctcacttcagatgtcagttcaagtgtcgggaatcacctgcacttctggccaactggctataaatttaggagttttcatgaccctctgaaattaaagaattccctagaatgattcacagaactcactgaaagtgctatccttatgaatgcaagtttattatgagggatacccatgggcaagctctggaagggtcctggacccagagcctccatgccctctccctgtggcatcagggcacctcaccctcctttgtgtcagtgtgttcaataaccaggaagctcctctgagcctcagtgtccagaattgtaattggagttccattatgtagacacgaatgattgattaaattatttgttacatgattgaactcaatatccagcccctctttcctcctcagaggtctggctgaccagagttgcaaccctgtgatcacagggctaatctttctggagaccagccatcattctaaggctatctaagggtctaccatgagtcaccccaattgcatcacaaagtcactcctatcactcaggaaattccaagggtttttgaagctctatgccaagaaccagtgcaaagaccagatacattcctaattatactacacatctataactcacattaaggcacacagtttccaatatatattcttttatttttgactaacattatattaaaaataaataaagttatattaataccaatggccctggctatttatgttgatcagaagctctgatttttagatgtatttttcatatgtgggaaaaataggaaaatgaattaatgtttggtaataaatatagattagcaaggcagaatcattcaaaacatgggatccatatagaagataccgaaaaagggatccgcggtggtagaaatgttgggaaaggctgccaggatggacccttgcagataggaaaagctaatctatgatcaagtgttcatggtgagagaaggcacagccccccttccctcccgaacacttcctctctggtgggaacaagattggtgcagtttgacatatgaggacacagtcatctcatttccactgttaacccagaggaatggcagtagtggtagaggctcttaggaaaggtgcaatgtgctaacatgagagagaaatttgggaagataatgcctttcaaattctgtcccatagaagacaccagccctgggcatttggatgctgttgttcctgggttcaaagagtttgtgagtgtcctgtccagtttcatactccttgctttgacacagacatcccattagacctttctttcctgatgtgattgctcttctttgctatgcaaatttaaaacgtgtgaggagaaagctgtgttcatgcatgtgaatatgctgaactcctcctctggtctccctcacatctaccacatccaggaatggaagatcaagcttggtgactattttcactgaaagagacttttcacatcccaagcagaacaggcatctttcctggttaggtgctgttcaagtctgctgtgtgttttaaaccatgttccctgaagctgctttaggtaaatattggcattcagacagatacacaaatggtcttttgcagaaagttgatttaaaacaggttagacctggatttcaaatcaaaacatttaagctttgttttgggacaaagcctggaaagtttctcatctgagtgagaacagagaggcttcctaggaatgagtggaatgaacactaaaaagctgttctttgccattctctgatgttagcccaactgtgaaggagggagggtccctcttttatatttaatcatgataaaactatagtatgcaaagctaatgtttaaccattggaaaagcctggtaaatcagaggtaaagaggaaaataaaaagctctagatcagaggaaggaatgtaaagtggagaaggtatgatttgttctcttgaaagtctatttttttggtggatgtaaagcagttagaaaaaaagaagtatatagagtactgagcaataaaatgaatacacaggtctcacatgaattataagagaataaatcaaaagaggagaaaattctcaagtctatcccttcattatcagatctttatttctttcatttgtaactctttgtgtttgattcagtacctcacgtaggttctggaggcatgtttaaataggagtagtgacagtcccatgtgaacagggtttaagaaaggtgaagattgcatttgtagaatttttaccatatggcatggagctctgaaaagtctgacaccggcatttgagaattattgaaagaaacaggatgcagaacaagaaagcatttttaattcatttattcactcaactaatatttactaactatcttttatatgccagatattggctctggcaacacagcagagaaagagaaataaaaaggatggcacctacattttattagggaagacagacaataaatgaagaaataaatgtacagtataaaaagacagttttaagtgctctggggaaaagtaaaggtggataataaatatgatggggggtgtgattttctgctcagatataggaggagaagtcaacgtggcatgagatggtgagctgagggaatatctcgggaaagagcagccaggcagacggaatgataagtgtaagccctgaggcagatgggcaagacacatttgaatgcaacaggaagattcccacgaagcaaaaacagggatacaagattacaaggggattgggggaggtattacaattctcttttatggtactttattatcctccaagggccacagagagtcccaagaagtcttcacatggactgttcaaggagtttccattctctaggtttactttacattaggaagcattcttaaatttgctgcaacttcttgttgggattatcgctttttaaaaaaactcataaataacccataaaataatgcatttaccatcatgtccagtagacatcatttaccttggccatttatgtaagaagtattctgcccagaatattacaaacaggagacatccctgatcccagtccctcacaggtttctcatcctcataggagtgaggtggatagagtaagtgtccccaaatcctgcaaagccagtgctgtggtctaaatgtctgtgtcgttccccctcccccaccaacctgccccttattcataggttgaaatcctgaccttcaggatgattgggcgatgggatctctggggggtgattaggttaggtggggattattgcccttttaaaagaggtctgagggagcttggtcacgtcttctgccatgtgagaacacagccagaaggtgccgtatatgaaccataaagtggaccttcactagacactgaatctgctggcaccttgatcttggaattttagcctccagaattgtgagaaataaatttttattatttataagacacccagtttgtggtattttgttatatcagcctggaatgctaagacagacagccaccgttctctagccaagggccatttaagaagatgtggattctgcacttcagtgagccaaattccctatatttctccatatatccaggaagatataaattctctatatattcctgttagattgcaggacccttagacagggacgtctcccgcagaagttacacatgcacagggctgagtatgtggccagaatagccatgttagtcttcaaatctttgtgacccttggccaagagaatttggtcaagaactcttaactaggttaagcactttactttgattgtagaacaaagagataatctacaaatactggtgctagatgactcaaaagaagattaatacaaattatttataatctgctttaaacaaatacatgaaaattattctgagaaagatgttcatgttaataaagtctctggggaggccaagtgtttcaaactcaatccagatagttgggtttgctacctttgtcagagaaaccctgagcgcttggagagacaggaaggaagatgtaacagaatcaccagacacagtcatgcatttcatgtctccagtgtactagaaaacactcagcttctgaagtatctcccaaatctcccagaatacaataggaactttgatttctagactattgatacttgaaggaagcaactcatcgggcagccaaccatctagtgtagagcttggagaaagtccacactgtgagatgtcattgtcttgctttcatattcttacttagcaaactaattcacagttatgtattaagcccctatctggggactgagcactgggctcccagctggataaataggaatgagtgaaacaaatgtctctgccttctggaattttattttagagggggtggagagacagatataaacagcgagaggtattactcaatgctgagtgccctaacaatggagaggtggctgagatgcagaataacagtagaagacctactcagatcaagtgccaaagaagatctgttagagaagatggtctttaaggagaggactgaaggtaaaaatcattccagttagagagaacaacacaaaccaaggcattaaggtgggaaagagttcattgtataccagcttgactttcaaagaactgaagtgtgggaactctacctctcatctggagagagtggctccagataagagtcatgaaggtggttgggccaaaccatgcagggccctatggaccagtgtaaggagtttggactctattcagtgtgaaataggggagtgacaagatctgacttagattttttttttttttttttttgagatggagtctcgctctgttgcacagaccagagtgcagtagcacgatctcagctcactacaacctctgcctcctgggttcaagtgattctcctgccccagcctcctgagtagctgggattacaggcacctgccaccacgcctggttaaattttgtatttttagtagaggcagagtttcatcatattggccaggctggtctcgaactcctgacctcaggtgatccatcccaaagcacagagattacaggtgtgagtcaccccacctggcccgacttagatctttaacagatcccttggctgctatgtgggaaatggctggagatgggaagtaggaagtagagaggaacatgactcagatgttcaagtacgggagagcgatgattgtgagttggacaagagcaggagcaaagaacctggggaggagcgcccatgcgattatcttcttaaaataatctcagcaggccttgctgatagatggaattcagagggaaatgcaggtgaaggaatcaaaggggactcccaggtttctggtggctgatgattgctccttttacagggatggggaaggttgaggaaactgagcaaattggcgatgagcacagaaactggagccagattgcctaggttcaaatcctggctgtgccacaaactacctatgtgaccttggcgagtgtcttaaccgctctggaccctcttttttctcctctataaaatcacggtattaattgtacctacctcatagggtggttttgaggattaaatgatcaggtatatgtaaaatacaagtaagtactatgtaagtgtcagaagggggaagaaatagcttgggaggaaacaatgagttgatataggagataatcaaaacaaatacatggaggagacattgaatatacaagaccagtgctcagaactgaagtctgggctagagctataatgtgggatttttctgtatacagaagagggagtggaagaaataacccacagcaggattagagggaaagaaaagagagagccactttccactttagaattgcgtattttatagaggtcagacaaaggtgagtgcatcctggagaggcgggaagaaacctaggaggtgaggcacaggagccaatggaaggcaggctagctgtgagtgacacatgctccaaggggtcaaggcttcttattataactcatgtgtcatggaaaatacaacatcaatggcttgtttgtccctgtcttccctgatttctgaatctcattcatctttctactccatcccacaccctcctctgttctcacattccagtcctcttgctctgacactgccctgatgatgaaatcactctatttaaaaaagaaaagctgaactattcacagtagcaaaaatatggaataaaactaaggtttatcaacagaggattgaattaagaaaatgaatgtagaatactatactatactatactatagaatactactcagccactcagccacaaaaaaaaaaaaaatgaaatcatgtcttttgcaggaacatgaatggaactggaggccattatcctgagtgaaataactcagaagcagaaagtcaaataccacttataagtgggagctaaacaatgggtacacattgatatagagaacggaataatagagattgaacacttcaaaaggtgggagggtgggaggggctaagggctgaaaattacctattgagcacagggctcactagtcgggtgacgggtacactaataaaagccaagacttcaccaccatgcaccatctgcatgtaagaaatctgcacttgtaccccctaaatatttttaagaaatttaaaaaagaaaagctgaaaagtatgaatattttttctttgagtgagcccaagaacaaatataaactttttcttcagaactttggacacattatgaacaaagccatgttgtcagcctggcatatctcagggatcccagcgtctgccagtcttgcctgctgtggacgttcagcaccgcctactccttactgccctgtgggctgcagagcatgcctgcggtggtggtgggaggcttctgtttgtgcatcatcttccataggcacagtgatcattgccagccagtggcacttctaggtgaggaggctcttaggcgaggcccccaggatttgccctgtaggaaccgcttggttaccagtatttttctctggcctttacctgctgtattagtttcctagggctgctgtaataaagtaccacaagctgctggtttcgaatgacatgaatatattatctcacagttctggaggccagaagtctaaaatcaaggtgtggtcagggccgtcctccctctgaaagctgtaggggagaacttcttagcctcttcctggtttctagtggtttactggtataggggagtaacagtaatccccataggttcttagttggaaagcacctttgttacaaaagacagattgacaagagaaaaccagacagaagtttattaacatgtgtattttgagtatacatggagacaccaagagaatgagtagttttcagaggtggctttgaatttcagcttatatagcatcttcaacaaagaacagtaaattttttgtaacaagacaatagaaaaggacctttgaatctctgtgggcagcaacttgcaggtggggcagtgaagaaaggcaaataacttgcagataaaggttagttagtacagcttgctaatataaattcttctaataccattgtcaggctgataagggtcttaaactatcttcagtctttaacctttgttctccctggtagtcaggagggcagaataccttttgtcttcataaatctttgtcctgcttttaggcaaatggaggaaagatatctcttgagtatctgtttcttcttgtcttcaacaatccttcatgttttgaagaggcacattctggtctcatactggcagctcgcagctgcgtaactccagtctctgccttcaccatcacatcacattctttctgtatgtctctgcctttacatggctgtcttataaggataccagtggtattggattgggggcctgccactgtgacctcatcttaattaattacatctgcaataacctggtctccaagtaaggccacattctgtggtactgtgggttaggactttaaggtatttttttggggagacacaattcaacccataacacctgcctcacttgactgcattttatttcagggctgtttacagtaaactttctttggttttgaaaaatgctttttactggaaaaattgaacaggaagtcttaacaatttccaagtttgattgctttattttttataatctactccatttttccttgtatcataaagcttcatgacccaacatagcatcttgacattgaacagagagccatcgtttctccccggctctttgagagctccttgtcctggagttttatctggagctttgatttgatgcctcaatttttggatgtggcctttatagggctttctgaagtgatgagtgatctggcttcaccgcatcttcaaaatgtccctgcagcaactgctattcttgctctgtagcatttggctttaaatatgtttcatatcaacagggttggcaccttctgtttttctcttccactcatccttctgaatgtaaatgtttaacttcttgcaaacacagtacactttgcataaagaaataggtacaactggcttttgtgagtcaaaaacagactggcctctcccaggggcaatagcaaacagctccctaggcccagcttggccaagcagtggcttcaaggtgtcatgtgctaaggctgacctccgaaggatgattttagaagatcaagggagattatattgtcttgaaaaagatggtttaaatgagatgaaggctagtctagtttaggagcaaagactgttggaacagaccacttactggctgtgggaacttagacaagttacttaatcatcagtttcatcatctgtgaaaaggatttattatatctaccttataagtttattgcaaggattgaataagcaaatgcaggaaacgcgcttagcacagtacttggcacatagtgattagcagcaattgttcttagtataaagagctcctgttactttccccctttatctagacattctttgctttaatttgttttccaactggcttcagcagcatttttcttttggaggcatctgaaggtcaagtttcagaaaaggaaagcaactaaatgtgtttaaatgtgtggatggaaatctgatcaaaggcaatttttttttttttaaatagactttgccaagtattcaggtgatgttctacgctagcactgactatgttaggacactagggttactggaaataaactcagccaagtattgattagtaatataaatgtcaaggaattaagcttgcagtggagcaggcaatgcaagcagtcctgtttggctgtaaaaatgccgacattcctgaagcgatgagctcatcattaaattcttcatcttccacacccataagagaattcatggcttgtttgctcatttttgctttggttttctagacagctaagaaggaaataaagcagtgcttcttaaactttattgtgtactagaatcacctggaaggtttgttaaatcgcagattctgcatcctggccctgcagttgttggttcaggaacactggggttgggcctgagaatttgcatttctgtcacattcccgggtgatgctgatgcagctgcttcaggaaccacactttgagaaccactaagatgaactccctcgaggcattgtgatgtgacatagagcagggggcattttagtcataaggtgatgggtttgagtcctggggctgtccttattagcagagctcttttaagcaaataatctctgtgagactgggtttcttccattttcaattagaaataataaaattcacctcatgaaggctcttgtaagagttaaatgtttgtaaatcactttgttcatgtattagttttaaaagatttcattaatctttgattgtaagattattttgtaagtcatgtaatatttccgaatgatttgggcaaccaagtctatcaaatgaataatgccattcgtttaaataatggaagcagttttaaatatttcactaaaattccacttcagaattcccaagccctttttcaagttggggtgtgtgtgtgcgtactttcttccccccttgtaattaaacaagttattcctcccccatttaattcttgctaagtactaaattgcataataaattgggaatttcctccttctctaattctgtgcattggcattttagcatattttgatgtgtaggtggtaaaggccagtgaaaagttcacagctggagtgcaaaccctgagttttcatgatgcatgaacaactgggatctgaccacaattttgtctttttatatttagaatcagccacgtcaatatctgcatggcacagaatcacctgggagcttcttacacatgtagaatttagcaccccatctctaaaacatatgattcagtatatagaaggtgtgtcctggtcatatacatttaaagtatcactccaggtggtacagagactgcacttcatgaaacaccaggaatggtctggaatagtctagtttgcttttaaattcagcctctgcctgcaactagctgtgtagacttgatcaaattctctggtcttcttaaatcttggtgctgtttatgtgaaattgctcactctcatttattggggctgttatgcagattataattaacatatataaagtgcttagcatgtaaagtgtgctgggcatgaagcattcaaacaatctaacattggggtagttcttttacaatgccagacactggaaggtggacaggtaagatcaacacaaaagttcctagatggatagaagtgaaatgaagccagttggctctgtgaatccataaaatatttatcaagccttggagaaagagaattcatcaaaaattatattaaagtgactaatttattttctttctttctttctttctttttttttgtgagacacggtctcactctgtcacctagactacagtgcagtgacacaatcacagctcactgcagccttgaccttctgcgctcaagtggtcctcccacctcagcctcccaagtagctgggaccacacctgcacaccaccacacctggtaattttttaatattttgtagagacagggtcttactgtgttgcccaggctggccctgaactcctgggctcaaatgatcctctgtctttggcccccgaaagacctgggagtacaagagtgagccaccatgtccagactaaagtgactggtttgttacaggtatcttcaggtcaggaacattcacaactagtttctaacttgcaattattttctaggttctaaagttcttattttagatgctataagattaaacagtgtttgagtgtattgaaatcaattattcagtctaatctaatgaatcagcagactatcatattttactgtgccagaacactaattttccattcactttaatgtgacagataatgtcctttcatgaaaatattaaacccttcaagagagccaaaatgaacccatattaatacaagacaacagagccaatactattcagtaacaggatagaaaaatgctgtttaaaaggaaatattattactgtaaagacagatttttattcaagaagttaggaactaccacataaatctacgtttactttgatttttctcaacatctttgtggctgtccttctttagtctcataagcaattttaaaatattttttctatattatggtctttcccagcttactgacatgcttctaatttacatgcttaaaattagtagtgtggcattttttacttccttgcaattcctgaagatctatgatgtcagtagagcttttagaaggtcttctaattgcacattcattaaacaaagcttaagaacagacagtcctaagggggttttcatttatggatcatttagtctgggattccccaaggacaatggtcaacattaattaaaacatcttgaagtctgtaaaccacagttacttctgtgcgagatgccatgatgagctttgaattatcacttgaaaaataagaagatttaggaaatttcagctttcttgttgctctcctgcaaatgctactttaaaacaaattttcttcagtgtcaccaagattaacacaacttactgctctagagaaccaatgttttatatttgtaatttgttacacaaaagaaaaagaggactcctgagatatggggtagatatcatattccctgtgtctggggggtagaccatcacttcaactgtaactgccagatgggttcttcctgctcactgtgcagacaaaatcagtccactgagaccatcacattgcagtaaagaaaaagtttaattgatgccaggctagccacaccatgtgggagacagagttattactcaaatcaatttccctgaaggctcaaaagttaggggtttttcaaggttaaaatggagggcagggggctagggaaggggcatgctgattggttggagatgtaattataggggtatagaaaacagtccttgtaggctgagtctgcttctaagtgggggccaccaaaggagttgctggtctgggtggggctgtccagtagtcagaaatgcaaaagcctaaaagacttctcaaaaggccaactgtaggttctataatagtgatgctatctgcaagagtaattggggaggttgcaaatattgtgacctccagaataatggcaggtaattatgtaactatgcctgcatcttagtaaaattcaggcccctctcatcctcctaacttggtagacttccattaattttacaagggtagtttagcttttgggaagagctagtatcatttaaactataaactaaattcctcctgaagttagtttgccccacacccaggaatgagcaaagacagccagcctgtgaggctagaagcaagatggagtcaaccatgtcagatttctcttactgtcataattttccaaaggcaatttcagagccactcctgaagtggtaggaaggtgtgcgaattatgggtttgtcatatgcctctcatatgcatgaaggaatatgcatatgtaatacaagaaagatgtcattttgaaccaatgggactttcaagtatttccttctaggttggacaccgaggaacagtaagagattatccagactttagcccatcagtggatgctgaagctattcagaaagcaatcagaggaattggtgagtgatattttacaattcctttcttaatgttgaagcaaatcaggcaagttacaatctaaaagttcagtttgctcagattggcttactcaatttaataaattgtcaggaattttctaaaattgtgaaataacgaggaaatatatagagaacccagttttattaaatcttaacatttatcatatttacttaatattaaaaattaccactgatactagtggtctaggggagatccccaaatgccgggggaatctcaaccctggctggtatccagactcttgacaccatctagagaagaaattcaaggatgggtcaaaaaatactgaaaacacagagatttattgcaaagtgaaaaatacacactcaggaaaggggagtgtgagtgtactcaagagacagtcgtgcacaagggggtttggggctgttgcctttatgggtttctttaaccaaggggtggaatagtcatgaagattctgggaaaaaggtgatttcttgaaactgtagtgccacccctttttacaccaaatgtcggtgtttccggaactgccatggcactggtgggtgtgtgattgagtatgttaattagcatataatgagatcctaggagaatcctaggtcaaatccagcgccatgttgggtccagtgggtcttagccagcttgatccacactatgggttttcagggtcatatcagcccctagtttctgcagctatttcaacagtttccttttgctagtcatgtgaaactgctgcctggaattttctgttctcctgtgaccatcctgtattagtcctatctaaccaccaccaccactgccaccaacaacagtaataattatcataataaatcattacaaatatggcccccttggttgggcatggtggctcctgcctgtgatcccagcactttgggagggggaggcaggaggatcactagagcccaggagttcaacaccagcctggcaatataaggagggcccttctctacaaaaaaactcaaaaaattagctgggcttagtggcttgggcttgtgatcccagctacttgggaggctgaggtagggggatactttgagccagggaggttgaggctgccctgagctgtgattgtgccactgcactccagcctcgatgacagagtgagagtctatttcaaaaacaaaacaacaacaacaaaaaaacccaacacaatcccgtcagttcttcctggatttcactcttgcccctttccctagagataaacaccatcccaaattagagttcattcccatgaaacttttaataccataactacatatacatgtacatattgttatgcatggtctcaaacagcataaaatgaaatcatactgtatacattcttctgcaatatgtttttgtctcttaacattatgtttttgagatttatccatgttgatatggtgagctctagtgcattaattttaactgcatggtagtctattgcatcactatatcagaagatgggaatattgatggaacatttaaattgcctacaattcttttatattgcaatataaaaatgctgcaatgaatattcctctcatgtctcattgtgcatatttgctagcatttctctagaatatgacaagaactggaatttccacattgatggggatgcttctcttcaaatcaactagaaattttgccatactgctctctgaaatgaatgcagaaattagcattcctttcagcaatgtacaagacttccttttgctccatattctcaccaacacttgctatagtaagactattccatttttctaattaagtgtgtctaaacagtatcttatactgcatgtgtgtttgtttcctgtctctactccaatgactgatgcagttaagcatcctcacttgtgcatctgcttccactttcatatgtcaataaaatataaaatatattttatctatttttttcagttggtttgtcttctttatgattggcaagagtttttttataattcctcaatacagactttttaaaaaatattacaagccatgaaaatatttcctataagtttatggttttttttttaacattggtgacatggtttggccctgtgtccccacccaaatctcatcttgtagcttccataattcccacgtgttgtgggagggacctggtgggagatgactgaatcatggggacaggtctttcccgtgctgttctcatgatagtgaataagtctcacaagatctgatggctttataaggtggagtttccctgcacaagctctctccttgcctgccaccatccacgtaagatgtgacttctcctccttcccttccaccatgattgtgaggcttccccagccacatggaactgtgagttctccattaaagagttccttcataaattgcccaggctagggtatgtctttatcaacaacgtgaaatggattaatacaattggttacagtaatttttattgcatagaagttttaaattttagtgaaatcaagtttaccaatatttttgtccaggatttatgcttattgaatcttttctataacgaagtcataaagttagatattctcctactttttttttcaaagttttgaaattttatttttcgtattatgatcttaaatctacatggaattagtgttcatggatggtatttaaaggtgtctcattttattctatttcatgtggacatttaattgtcccagaacaatgtattgaagagctcttccttttcacactgatttgtacgtaatatcacctatgttttatgcttccctatttttctcttctctgttatgcttcatttatctatttggccctcccaacaccacattgtcacaattattaggattttataatgacactaaatatctaccaggcaaggtctttcttggctctttgccctcctctatgaattttaaaatcagcttgtcaaattcaataaatatactatattagaactttatatcaatataatattatgttttttctgcctgtttgaggtttattttttccatttttcaatgtaagttatttcttcatttatctcttgatttccttattttttttttaagagagaagggcttgctctgtcacctaggctcgaatgcagtgatatgatcacagcccactgcagcctcaaactcctggatcctatggcctcagcctctggtgttgctaggactacagatgctcatcacaatgtgtacctaatttttaaattttctgtagtgacagggtcttgctatgttgcccacgctagtcttggactcctgggctcaagtaatccttctgccttgtcctcccaaagtcctgggattatagatgtgagtcactgcacccagcctgattgccctatttatatctagtgttgaatagactgtttcatgaggttaatagtctttaaattctgtcacctctttttaaacattatgtttcttcatgaatttgcactttggcttacaggccttctttaagaaggaggttattgtttatgagcaccacttctgataggttctgagttcagaatgaggtatcataacggtgtttgcattagggatgggtcagacacagtctctgaacctgaggcatcttggcttagtttttgatcttgggcatgtttaaaaataagagatgagaaactgccaggcatacaaactacacataactgcaggtagtttggtatagttgtagtctaggtgcataggttatagagatgcagagagggggtagaaaatgagaacaaagacataaggcaggagagatcataatgagctgatacatgagctaaggggcttaaacttcatcctgaagattacaaagagccattagaattttagccaagggggtgacatgatcagattgtatttttaaacatttacttaggcagtagtttacaggaataattatatgggagtcacattaggaggtgatttaggttatccaggtaaaatatgataaggacacaggagcagagggcatgcagaggagacgacaaatttaagagatgcagataattgctataatatagagaataagataaagaaaggaatctgagatgattcccagggtttttgcctggatgactatatccatagttgtggatgagggaacataaaaagaaagacaagtcagagaggaaatacaataaattccacccagaatgtgctgagtttcagatacttgtgcagttgtggtggccggtagtgtactgacacagatgctgggtacaatacacagcaccaaattggtgctcagacccacagagcacaaatacactttaatctgattcggtatttatttaactatgtgtaagaatacaaaaccaaagacacagaaaggcagcatctttcattgggaggcccagcagctaaccaagtacacagaagcttttgcttcatcattgatgtaagctgtgtaccactgccacggaagtgtgtagatgaggtctgtgagggtcaccttgacacaaagaagttgagcattgagttccaggtgctcttttatacctctctagtcatgcatgctctaggcctgcaagccaattcacagcttcccaaaccaggtatcatcgtgggttgggaaattaattagacacaactttccacgtttttcttactactgtagtcaccaagataagaatgaccttgaggtcattcttaggcaggccagcatcagctctggcctgatgttaccttttgcttacaaacaattcattttgtatatgggtttgaaatttatgagagaggccgggtacggtggcttacccctgaaatcccggcactttggaaggctgaggcgggtggatcacctgaggtcaggagttcgagaccagcctgatcaacatggtgaaaccccatctctactaaattaaaaaaaaaattagctgggcatgattgcacatgcctgtaatcccagctacttgggagactgaggcaggagaatcgcttgaacccgggaggtggtggttgcagtgagccgagatcgtgccattgcactgcagcctgggcaacgagagagagagaaagggcgaaggggagagagagagcgagagagagagagagagagagagagagagagaaagggagggagggagggagggaaggagggagagagggaggaaagaaggaagggagggagggagggagagagagatgtggaagaaatgcatgagagagatgtggaccaaagatagaaatatatgttttggggtcagagatttgggttcaacttcttgctggaccactcagcagttgtgtgactttggcaaggaagataagttcgtgtcttcatctttagtacagcgggcccctgtgaatattaactatggcaatgaataaaagggtgtttcatgcagggcagattttcaataagtgttggttcctgttttccagaggaagaaatattttgatatcaagtatgggagagagataaaaggcaataagacagtaaccaaacctcataaaggtaaaaaagtcaagttcaaaagtagtaggttgttttgtctgatgtacagaaaggagtatttagacaatgattgtttccttccccccaaaactatccaaataaagttaactttttttttccaaaactcaggcaaacaaaataaataaataaataaataaataaataaataaataaaattccaaccagataagatgctagaaattaaaatgccttactctctgcatttgtctcaggccattgatcattttgcttttgttcaagacaaatgttgagcataaatattgagtaaaataacttttgtttcatttaggaactgatgagaaaatgctcatcagcattctgactgagaggtcaaatgcacagcggcagctgattgttaaggaatatcaagcagcatatggaaaggtaaggtcacattaacatgacaggcagtaaagagatcattaatgtaccatggtcgctcccacatggttatgcccacagtcttctgtttcaggctgagtgtaacagaagatgccctgtgcatccagtcaggagcctggaatctgagtcgtggttttgccttgaactagctgactggctttgggcatgttacttggtctttctgggcctcagtttcttcacctgtaggataaggtttgccttagcccagtgggttctaaaccagaagtgattttgctccccaggggacatttgggatgaatggagacattctgatgatcacaaacaggatggtggggagtacttctagcatgtagtaggcataggtcagggatgctacaagcatctgagaatgcgcaaggcagccctccacaacaaagaattactaaggaaactatctgactaattctgtcttaggtaaccttttatttctcttttaattttaaaatatttatgtagttataggtttaattcattcagcaaagaaaatttagtaattaccagaaactatataagaacaagtaactttgggaggctgaggcgggtggatcacctgagatcaggagtttgagaccagcctggccaacatggtgtaaccccatttctactaaaaatactgaaattagcctggtgtgatggcacatgcctgtaatctcagctactcgggaggctgagggctgaggcaggagaattgcttgaacccgggaggcggagtcttcagtgagccgagattgatccagcctggaaacagagcaagactccgtctcaaaaaacaaaataaaaaggaaaaagtaaaagtaagacttggtctttgctatacagtttatttgtccaatgtctatttctgagtactaatctgtgttaggagatatcctagacattggaaatagactggtataaaaagcacatcctgccttctttcatggagctaacattctattagaatataataaacaagtaaataaaaataattcagatatgataagtgatatgaaagaattaaaatggttgatatgatagacagtgactggtgactggctcctgcagatagagtgatgaaggaatgtcagtgaggggttgttacctcactccccactaagcctaaacaatactaggggttctgccctgcttgatcaggagatagtatttaaggtacagaaaatataaaagccctgaagcaaaaagaaactgggaatatgtgagaaataaagaattccaatatggcaggaatgtagaaagtgaagggggcagaagaaagagatgaggctggagacaggttgagaacatgctaagccttgggtcttggtagggtttagattttattctaagggctacagggaaccactggaggtttgtaagcagaggaataatatactgcagtttttatttttaaaggattattttggctgctgtagataatgaactgtggggggaaaaggtacaaacagacccggccaactgttgagagggtctagtgaccatccacaggcacctcaggaattacctcctgggagtgttctccaggcccccaggctccattaagacacccttctctgagctccctttatcagataacatattatattgaaattttatctttgaatatttctgtttttcccatgagggcagaatgccttaggataaggactttgtctaacttacctttaaaggactagcacagagcaggtgcccagaaaacatttgttgaattgagtgaattgcctagcttcagggcaagacaacactttcacatacagagaaggtgaatgatctattggccttttggtatttccaaaatatggaagaaagatggaggtggaggggaacaaccatttctcacagtggaataggatgagagctgtgaaataagattcagctgcagtggcttggattgaggacagatggtagtgaaatttaccatttagagaggaaaaaaacactgtggcaattaaagcagagttgataacactgaatgccaccccatttgtttcagcaggaacatgccactgctgcaccccccaggagtgtggttgtgtcaatctgtgcccacagcgtttcagcaggctcagaggctaccagcctctatttcagagctgaaaataatcaggagcaggaacaaacattattcagtattatgccattgaatattgaaaatagaaaccctgttacccccctttaagcaggggagatggactgtacttaggtgtgaaaacagtgctcaaaacaatatcaataggtaatgtctgtaagaggctaaattctagtgttccatcgccctgtaggataactatagttaacaataatatagtttcaaatagctagaaggaggatattgaatattcctaaaacaaaaaaatgttacatgtttgagatgatgggtatgcaattaccctgatctgattaccatacattatatgtattgaaacatcactatgtaccttatgaataagtacaattattatttgtcagaaaaaataagtctaatgtattgccacacttagggttttcttttctttacttgttgccagaaaattgcttctgatgccacctagttccacattctcaccagagacaaatgaccagccactgtcctcccttccccttcctcttggagctctttgggagttactgagaggcaagacaccgaggaagagagcacctcccactgaagctgggcgtgaatttataagggttcctcttcctcttcccttaccccaatctaagcattgaaagcatggcggatctaggaaatgcatttgaatacagttcctaactgtggcactcatggaatcctcccatttggctctccttcaaaaaacctctacaaaacagaacaatttgggagtaattagaaaatgcagattaatattcatagaaatattttcaacacttctgtttattccctgtggatggacatgttttgtctgattttgatacatatgttcatctttcactaggtgactttagagaaagagaaaaaaagtatttcacatttttccccttggttttttgattttaggagctgaaagatgacttgaagggtgatctctctggccactttgagcatctcatggtggccctagtgactccaccagcagtctttgatgcaaagcagctaaagaaatccatgaaggtatgagccccccacaagccatttctgcccagggtttgaccaagtcatcaaaaatagtgactttcttgcagtgcacacttgtgatgggtggacttggatgcccttttggtctggactctcccagtggtagaatgactctgaaataggcaacagctatagaaccttaagcccaaatgttcctgggctggaagaattttgtcatatcctttgtttgacatgaagagtcaagttctctaatttgtcatcgttgaaagtaaatagcactatgattaaccccaacactcaagctaaaaacctagcattatccttgagcccttgttttctcttacccttccaagctcccaaatctatcagcaagttccttagttttacttcaaaatccattataaatatgtgcacttctctcaaaatccattgctactgttctagtctgaccaccatcatctcttgactggtccatatcaataggcttctaactggtccctttgcctccatttttgcccatctcaaattcattctacacagaatagccaaaattatttttattaatttattttaaaaatcagattatgctacttacctgcataaatttccaatggctttgtacgcttaaaatccaagcttcttatcatgactttcatcacccaacatagtgcagctcctgtctaactctgtggctttttaaaattctatttatatcagtcagggttccctcagagaagcagaaccaataggcaggacatagactttaaaagatttattgtaaggccaggtgctgtggctcttgcctgtaatcccaatactttgggaggccaaggtaggtagattgcttgagctcaggagtttgaaatcagcctgggcaacttggagaaaccctgtctctacaaaaaataaaaaaaaaattagctgtgcatagtagtgcattcctgtagtcccagctacttgggaggctgtggtgggaggatcacctgagcccagaaggtcaaggctgcagtgagctgtgattgtgccactgcacttcagtctgggtgacagtgagaccctgtctcaaaacaacaacaacaaaaatttattggaaagaattggaggccatggtgggaggattgcttgggctcaggagttcaaaaccagcctcaaactgagcaacatagtgagaacttgtctctacaaaaaatttttaaaaattagccaggcatggtggctcatgcctgtagtcccagctatttgggaggctgaggtgggagaatcacttaagcccagcaggtctaggctacaatgagccatgaccgtgccactgcactccagcctgggatgctgtctcagaaaaaaaaaaaaaaagaagaagaagaagaagaaagaagaattggttacatgattatgggactggttaggcaagttcaaaatctgtagagcaggctgtcaggaaaggcaggctggaactcttgggcacaagctgaagctgctgtccacagaaagaatcttctaaacagaagccttgcctctggtcttaaggcgtttcaactgattggatcaggtctgccgagaaaggtaatctcccttacttaaagtgaatcgataataaactgaaattatatctacaaaataccttcacagcaacacctagattagtgtttgattgaataagtggcattatagcctggccaagttggcacataaaactgaccgtcataccccctcctgctcacccattaatgatgtagctacactggccttttctctgctccttgaacatcataagcttattcttgttttgagatctttatacatgatgtttcttccatctggaatgcttttcctccagacattttccattaattcactcaaatatattttcttaactgcacttattactgtctaaaagtatcttgtctatttatttgtttttgagacaaggtctcgcttcattgcccaggctctagtaaagtggtgcaattatggctcactgcagcctcaacctccctggcaagcctccaacttcagcctcctgagcagctgggactgcaggcacacaccaccacacctggctaattaaaattttttttttttgtagagacagggtcttgctatgtcacccagactggtctcaaactcctgagtcaagcaatcctcctgcctcggcctctcaaagtactggaattacaggtgtaagccactgcacctggccttttctatttttaaaatccatttgtttattatcttttttcatctaactaaaaggcaaacctccaccatggcagggaacctcattggtcttggcctatatcttctgttcctagagcaactcctgaaatgaagtgggtgctcaatgtattaattaataggaaggaggaaaaagaagggagcctagatctgaggcataagccatattctgccttgccatcagggaatggagttatcttcttttctgtggaggacatatgggcatctgagaagcagatggcaagatggaatttgatgtacaggagatttattttgagaaacacctgtgaaggataaagaggcgaagagcagggtaggtggggtgaaccttcagactgcagtggtggcctgacccctatgagaggagagaggagaggaagtaggctgagattaggaagagcctcagtgcatagtgaagctccgagaaaaccttggtaggctgttggggagcccctgagcaaagactgccctttggaggagttctgtgttgggcgcaagtccagtacccctgttgtttacagtcattgactgacagccacctggagagggcatgacctcagtgtgaactttggtagacccaaaggtgtggcagttggaggctgttagctaactgcgttctttgcagctgattctcttgaagtgaaatctgagcattgtttctctatggctacccaaaggggagggtttagcaggtgtaattgtaaggattagattcaccaataagtattagaacagtttctcttttacataaaagaaatccaggctgtggtggcaccaccattatcagagactcagtctccttctatcttgaggctctgccgtctttaactcatggttttcacttcctggctaaagaaggctcatgactcagccattatgtcttcattccaggcaactcaaaagagtaaaggacaaagaagggttcactccctcactctaaggatactccctgagcatacatatggtacttctgcatatatcccattggtcagagtttagtttctggacatatttcactgtaaaagaagctgagaaacatagcctttatatgggtagcaatgtaccaagttaaaagttgggggttccattactaagcaagaaagacaaaagagatactgtggtaaactaggaatctctgctacagagagacagaattcagtctctgttcatatgctgcactggccttattcaatcaagtcgtagtgtatatgacttttcttggagtcacagtgtgattcagtgaccttgatataaacaggactgagaggtaattagtccccatgccagccaggcccatgatgcacattactgaggatttgaaaggctccctgtatgaagagaatgatacatgctgatagacccagtacagtgatgcaaggatgaaatcattcaaaagtattatagagccttttctaaacatagtggaatgtttgaatgttggtagggttaatcctgttagactgtcacttctaatcttgaatgacacaggctttttcttttatactatttctttccagaattattcaattgattttcacactagagtgaaaaatttgctgtcactttattccagatgatttatgttattactaaaatatatggaaaaatagaaaacgagagcaatagagaaccttgtattgatttacttaaaagtgtcctttcatctatataaacaagataataagaccaaaaggcatgagattaagttatttaagtgttctaaaaattagattttcttttcctttttagggcgcgggaacaaacgaagatgccttgattgaaatcttaactaccaggacaagcaggcaaatgaaggatatctctcaagcctattatacaggtgtcttattttctgcttaccttcaccactgttcacacatatttgagccaatgttgcttttcctagaatcctctcaatctcttcatgaggcattttgagaagacaagacttacagaaacgagaatacattctaaaatcagctaaagactatgagtttccaggaaaaattggaatatgatctgagctagagactgctacataacaatagcattaatgctttacatttataatattacagctgcagtggattttgctctcggcaatctctcattaattgaattaaccattgtcatcaatgtaagagactcaaatcgtattttatttttaggcgttagaaatcactcagattagatccacgattttgggtgtgggaaattagattaatttagaggatgtgttgagcataaggattcaatagaagtagctaaagacctaatagtctgctggctgtgtaaaattagaaagactctgaaatgtaattctgactgtaactacccagggttagtgtgacttcacaggttaaggtcacagtccccacaagactaccttcacctcagacaccagcccacaagctcaggtgttttcaggctacacgtgcttttaaccagctggctacaaattcagggttctcactaccctctcaggttgaatagcacactagaatgacacagaactcaagaaagtgctgtgttcacaaatgcgatattatcataaaggaaacaaatcagggccaatcaaatgtggagactgcatatggagatatttggaagggtccagtggaagcttccactctcctgaccattgatatatcattaccaaccagcaagctcacttgattattggtagccttagtttttattggggtttcgttatataagcatgattggttgaaccattgttcatgtgattgaaccagtccacctacactccccagaggtcaggctgatattgtggctcaaagcctcaaccttttaatcatatggttgatctttctgatgtgaccagcctttattctgggtcatattgttagcataactgagctgtagtccaagagaccaaccatgaataacaaggacacacctatgacttgggaaatccaaaggatttagagtttacctcccaggaatcaggaataagaccagcccaattctctactattcaatggccccatagaaccctctccaagtactttaagggagccacagtttctctgtttgtgtctcacagaggtcagttgtgtcatagcagcttttgcagtgggagaggtccaaagaaggagtacatattggtcctcatgtaggtgttaaagaggatgctttgggagattcttgttagaaggtaaatacctcaatgtcaggtgactgttttgttattgatgtaccaattgggttctaatcagaaaaacagaaacagcactaggtattttgacagatagaatgtaatataaagaactgcttaaagggccgggtgcggtgactcacgcctgtaatcacagcacttggggaggctgaggtcagcggatcacaaggtcaggagttcgagaccagcctggccaatatggtgaaatcccatctctactaaaaaatacaaaaaaagttagatggtcatggtggcgtgcacctgtagtcccagctactcaggaggctgaggcaggagaattgcttgaacccaggaggcagaggttacagtgagccgagatggtgccactgcactccagcctgggcaacagaatgagattccatctcaaaagaattgcttaagctgggcacagtggctcatgcctgtaatcctggcattttgggaggctgaggtgggcagattgcgtgagccaaggagtttaagaccagcccaggcaacatgacaaaaccccgtctctataaaaaataccaaaaattggccaggtgtggtggtgcacgcctacagtcccagctcctcaggaggctcaagtgggaggatcacttgagtctaagagattgaggccacagtaagccttgatcatgccactgcactccagcctgcgtgacagagtgagaccttgtcttggaaaaaaaagaagaattgctaaacacctttcagaggactgaaaaagcaaaaagggaacaaaaggattcatgcaggttataaccccccagacctgagacaacaaaggaaagaggttgaggctatcagaaactggaagctagaatgagggacatacctggctgatgtcgggacctcaggggctcagagcagaggcttaaggagcaggagttcagatctctgaaaagagggctccatctgtaggtactggagccagtacctacacgggggtcaaagtgactttttctaggaagctggagccagttgctgctgtcggggtgaacagccttccctgggttgacactgacatgactagccgtcagatagcttgcacttctttccacctcctgccttccagtcccctctactccccagtactggtggaacctaatagggagcgggtacagacagaagtagacaagagaattgcttaatcattaatgcacaaaagagtatgttttaggtgtttaaaatatttcagttcaacaaggtttacatattttacaaaacccatcagaaccaggcactgtttcccaagttggcttggtattttctggtgtttcttagaagagccactgctccccaagtggacctgccctgtgacagatccctggagcccagcatttaggtacaaacagttccaggatgtgagctttatgaggatgaggattttcgtctatgttgttcactgctgtatcctcagttctaagaacagtggggcagataagtgcaaatatttattaaatgagtgtcctcaaaattgaggttaaggtcttaagagccaagtgaaacttttaccattcaggatagtgttgtgcagatatgacagatgataatagcacaaagttaccagagcctcaatttctatgtgagtaatgctctctgaggctacaaaggatacaactgcatcaaggttaccttggttactagagattaatgatacacaagaagatcaagaaggaaattgtctcaatcatgcatagccaaactttacagagattaaagtcacagcactacccgagggacccagttatgttgtcactctctcggcagcaggcatccattgctccccatgctaatgttttccgtgacagtaactgctcctcttcctttttgcttctaatgttcttgacaccagcaagtaacatcccctcccctaccacatggtgtttgtctacccaaggcttataaatatttgtgcatagcttttggttattcttggctactgttttcttcattatttccaggagtcttttggttctttgttattctattgtctttgtctccttttctgtgtcactcgctccctaagagagaagatacaatgggttcaggaagtcactatcatgttggccctcataaagggaccagatgtcttctacagcttattcagtacagtggcacaatagagtctaaataaagagagatctaaattcttaacttttttcggtattctaaagtcaatggtgtgtgagagagagaacactgaaacagggatcagggactcaaagttctagtccaggcacctgtactattaaaatattctatttgattttatactctactgtgcctcaaaatggataaagtagttgtcaacttaggttgaaataattttttactctaatatcccacaaaatatttgaaggaaagggagaggctgtgtgaaatgacttataaagtctcatctaaataattccaaaattacaaaatacttccccaagttctaagaaatgggatattcattcttctacttgatattttcaaatttaaagttttttatctaactagaatgaaggatagatgtaacaatatcacaaccattaggtttaatgatgcctactaaatattattatttagaaaaataacacacttttttggtggattttgcttatatgaattgctttgaaaagttacagatttcataaaaaagagacttactaaaatcatgctgaagaagtttccatctcagcgcagttcttgctattggataatctcatatcactttctataattgtctttcattgatttaaatagatgagaattctcatggctagtatggctaatttatagaattcttgagaatggtgcagacagttcagatagccacatggtgtcacctacaacaaagggtatagtggctccaagagaatcaccaccccatggatggggcagacagagatttaagactgatgggcactgcacatcacaggccatgcaaaaggggctacaactagtcagtactaaaatatatgaacacacagttggcatttgtaaagggaaatggcatgttttgggtagctttcttacttttgggagatacgaaaaaatatggtttaattatattcattaagattagggttagattcgataaaacagaaaaattacagtggcttacaaaaggtagaagtttatttctatcatatgtagaagtctagacattggcaattctaagtctagtatgacagctactcaaagcttttaggaactcagacttcttcttgattacttttatgccatcactaagaagtggtccttatcttcacagtccaagatggctgcccaagatgcagatatcagttcacatgtaaggcagttggatggaggaaggactaagatgaacatggcctcatccctttaaggagatttgtctgccttcatttcattgtgaataactaagttatagaactgtactagctaagaggaaagctgagaaagtagtttttaagctgtgtacattatatcttgcttaaggttagggttctcttagtatggaagatggccagaatggaaattgaaaggcacactagtagctcatccaccccagcttttccactatgcatcccttagtgccattgtcagatgaaataaaccaagatttgctccagaatgacaactctttctattcttttgcatctaccacaacacagtgcagtaagagttacaagaagaatgtaccatctcacaacagaaaagcatgaagaaattaaataaaagggcaagatttatcttatcacatacccattctttgctagtgttggcatttaaacttttctctgttttataatcatatttttcagtttgtcaaggcttaatttcattctgatttggtttcagtatacaagaagagtcttggagatgacattagttccgaaacatctggtgacttccggaaagctctgttgactttggcagatgtaaggttttattttttattttttaactccccagtaagctgcatgctcaataacaatttttagggagtttaaaaataaccaaactgagacaatgagttcacaattttccttatgaaatggtttgttcattttacattttcattgccaccaagcaatataatgtttaaccaagatcataaaagcatacataatgatgtaacaacaaagaaaacttatttgagtcagtaagtggaggtgttttggtcaggtttcacaattttgacattagaagacattctgatacatcatctgacatacaatatttatttccattataagtgtctccattttaaagaacaggtttattttcttctggactctgaagaataaatatttcttttgttagcttctaaattaaataggaagcatgatacagaagaatgatctttagagatgggaattaaattgagtatcagtctcaggattaaaaaaaagaaaatgattgctgcaatttcagccttgccaccttggaaaagctgccaaactattaatcatcatgtgacctaatgaggccacaccttgctttctctttttagaaggcttatgacttttattataaagatggtaaggtcaaggatgaggtgtattcacagctgtgtgtaagagagaacgtgatttaaaccatagctcaccaattttctttcagctgatttacatagcacctaaatgtgagaaaatcccaacaacggtctcagcctcatggttgaaacagcacctgtcaaagtgaggcattatgccattaggaagcgatttatctaaattatggtttcagttactttaaatgtgaaaaacttatgaaggttgaacccacaacaccaaatttatgaagcattgctgcaaacatatgctctcagaggtatatattcctaagtgcacatctgtttgtgtatggacatgaatgcacccacccacaggaggcagtatagagtagggctctaggacagggttctagaatcaaacagggctggaatctcatgctgccaactagctttgtatatttggacaagttctttaagtcttaaagcattcattttcatatctgtaaaactaaaatactaacaataacaagtactcatagggtgttatgaagattaagagaaagagagagtatgtgaagtacttagtgatcaacacagggtggtagtggttagtattatattaagaccgatgataatcagcatttatgtcattggagcgagcgtaagtgaaagagaacaagaagaaagcaaacagcagcagggtatcagcagcacagaaaagaaaccaggcaaaaatcagacagtcatacaaggacctaatgtttaaaaataggaacaaattcattttaaactattgtagctaaatgtttcattcacctataatttgccaaataattcaggcaatcccgtgttttggttttgtctcctgtctttccataatgtgcttaagtatttgtacatgaacacacataccacacacacacacacacacacacacacacacacacacaccacttaaaccatagagcctttaatatcacagttggggatctttgaggactttttattttttcttttttgagacagagtctcactctgtcatccagactggagtgctgtggtgcgatctcggctcactgcaacctctgcctcccaggttcaagcaattctcctgcctcagcctccctagcagctgggattacaggcacacgccaccacacccggctaatttttgtattttagtagagacagggtttcatcatgttggctaggatggtctcaaactcctgacctcaatcaatccacccgcctcagcctcccaaagtgctgggattacaggcgtgagccactgcgccccgcctttgagttttttttttttttaaataaactttactttttagagcagcttcagatttatggaaaaattgagcagaaagtacagagagctcccatatgaccctattctactctctcctttcctttccattattattattattattattattattttgagacaggatctggctctgttgcccaggcttgagaactatggtgtgatcttagctcactgtagtctcgacctcctgggcccaagcagacctcccacttcagcctcctgagtaactgggaccacaggtgtacaccaccacattcagctaattttttttttttttttttttttttttagagcgagagaaggtctcactcttgcattaattagtatgtgtatttattataattggtgaatgaatattgatacattattattaactgaagtttatagtttacattagggttcactctttctgtgatatagttctatggattttaataaatgtataatgtcatatgtctatcattacagtatgatagagtagtttcactgtcctaaaaatcctctgtgctctgccagttcataccttcctccccaccaactactgatcttcttactgtctctatagttttgccatctctagaatgtcctatagttggaatcatacagtacgtagccatttcaggcaggctggcttctttcacttagctatatgcctttaaggttcctctatgtcttttcatggcttgatagctcatttctttttagtactgagtagtattccattgtatagaatatttattttacctgctgaaaggcatcttctttgcttccaagtttggcaattataaataaaacttctgtaaacattcatgtgcagatttttgtatggacatgttttcaactcctttagttaaatagcgaggggtgcaattgcttgattatatagtaagagatatttagctttattaaaaaactgcagaactgtcttccaaagtgactgtaccattttgctttcatatcagcagtgaatgagagttcctgttgctccacattctcaccagtatttggtgttgtcagtgttttggatttaagcccttctaataggttgtgtagtggcatcttattgttttaatttgtaattatctaatgacatacaatgttgagaatcttttcatgtgccatctgtgcgtcttctttggtgagatgtctgttgagatctttcaaccatttttaaattgggttgttattttcatattgagttttaagagttctttatgtattttggatacaagttctttatcagatacatgttacaaatatgttctcccagtttgtaccttgtcttttcttccacataagacctctgtgttgggttgggcacagtggcccacacttgtattcccagagattcaggaggctgaggtgggaggacagcttgaggccaggagtttgagaccagcctgggcaacatagcgagatcccatctctaaaaaaaatttttaaattagctgtgtgtggtggtgtgcacctgtagtcatattagctattcaggaggctgaagcgggaagatggcttgagccttggagttcaaggttatagtgagctatgactgcaggactacactctggcctggccaacagagagtgagaacctgtctctaaatatatatatatatgaattttcggaggagggaactgaggcccccaaaattgtgtgatttgctaaaaatttcatgactagtcaatggcagaaccagaactggagccctgagtacatgatttttctgtgcaacctgtcctgccttaaagaaaaaccactaagatcccctgctggttgaagtactatgtgttagaatcttctatctttaaaggatggcccttgttttcgtcctcctgtttagggcagaagagatgaaagtctgaaagtggatgagcatctggccaaacaagatgcccaggtcagtaacaaagcgggaaaacatttcctttacctattctcctatgtggctgcctttgcatttatgtgaaaagggagaaaaatagcagcaacagggacttttctttttttttttttcctgtttgaaagagaagcctgaagcttggggatcggaaccctaactttttgcctgccccagtggtagttatcattctccttggctcctgacagcccaatttttgatttctagtcttctgaaagtgagagatttagataatagatgatggcactgacctctgaaatacaactccgattcttctcatgtcacctctcaaaaagaaaataattgtgtctctaatatcattctcttgtgaatagattctctataaagctggtgagaacagatggggcacggatgaagacaaattcactgagatcctgtgtttaaggagctttcctcaattaaaactaagtacaaactcacattacaatcctttgtgttgtatgttgtttttacaaatgtttttgcatttagtatacaaagatctagaaaaacgaagtttaaaattgcgaagtctgttccagttattcacacttcaggaaacaaaatgggaaagctgtattgtaactcaaggaagtactgacactacacttttgtttttccatagaggctgagtagattacctagtgagtaccaggtaatagatgggggagggaggtggcagggagaagaaaagaggccaccctctagggtgagagtagaagggcttgttcctgtggaatggagaagcccaactgcttccactccacctaacagttctccctagttagccacttccagaaaagccagacactgcaggtgagtctctgttgacacatcaatactgattaacctttagctatttctgatatgaaggtaagtggtagaatggatcaactcttatcgtcagaccagctattacatggaattgtgggcacccgccctcttgctcatggcatctcctagaactgttctggaagcaacaacacctagaaaactaaaccttcatttactgtgaacatcttctgactgtggcttccagatgctagtttacagaacaaccacacagcaagaccaagcttatgctgagttgacggaacaatgagtaaacataaggatattactgtgactttgaaattctgaaattgttctttcttaacttttgcattaaaatcacatttattttataaaataatgacaacagtatgtgatagttgctttattcatgtctttgtttgaaaaacaaaaaccagataaccctaggtctctctccaaaatttctttttttaaaaatgtattggggaaaaatatacttggcttacaaaatatgcctgtatacttggtgacatatgtacaggttttgcttggggcaaatactgatcaagaaattcaaatgccttctgggaggtgtgaagtaggccatgccaccttaggaaatgattcagcacaaggaagtcttcagaattaagatttctttaccagagaaaacatatttgactagtgattatagtatcatttcccaggtgctgctataaataaaatttaaaatagcccaacttactggataaattatttattatttaactatttaggctatttaaaatgcttactgcttgagagaaggggaaagagaaagagagatcattgaagaaaatcatctagggagtttgggttttgttgtagatgatttccttaaaaaggaacaaaagaaaaacaaaaacttctgtgcccagattttcatggtttaaagagggagttttttagcttgctacttgatcttctgcatatcaaataaaaaactagaatatattcaaatgtgctcaactgcgttgctttaaataattttgtggtgcttctttttagcatttgatgaatacagaaatatcagccaaaaggacattgtggacagcataaaaggagaattatctgggcattttgaagacttactgttggccataggtaagacttcgagtgctggtaaactaagttactttgcacttgctttaactcagtgccgaggcctgctccttttgggcaagaatcctgactgatccattttttttgctccctacagcccccaacatggtccaggatacacacagtacgctcaacaaatattgttaaatgaatgcttgaagaagttatttttttaagtcttttttctttttcttttttgaaacaggatctcactctgtcacccaggctggagtgcagtggtgtgatctcagctcactgcagcctcaacctcctgggctcaagcagtcctcccacctcagcctcccaagtagctgagacaacaagcatgtataccacctggcccagctaattttgtattttttgtagagatggggtttcaccatgttgcccaggctggtcgtgaactcctgagctcaagcaatccatccacctcagcctcccaaagtgttgggattacaggtgtgagctaccacatccagccatctttttaaatcttaccttgctttttaaatttgtatttgtcttgtgaccatgtttagcttgtagacttcttgagagctgaaatattttatttctactggcatttttattgagctttgttgaaaactgagacgtaggcaaagcacagtggcatgcacgtgtagtcttacctacttgggaggctgaggtggaaggattgctggagccaaggagttcaaggccagtttgggcaacatagcaagatcttgtctctttaattaaaaaaaccacacacacacacacacacacacacacatgcaactaagacctaagccagtttggtaatccaccatatttggttatttatgaaagatatcagtggcttttcttttctttctttcttttttttttttcttttgagatggagtctcactctgtcacccagactagagtgcagtggcacaatctcagctcattgttgactctgaattgctaaaagataagccgaggaggctaagaaagggaaaactttcttcttcaattaaaaaagtagaattgagatcagtcttcataattagttctcagactgttccagtggtaatgatacacctggttaatttttttttccattttacattgttaatctttttttctttttttttctttgtgacggagtctcgctcggttgcccaagctggagtgtggtggcgcaatctcaggtcactgcaacctccgccttccaggttcaagcaattcttgtgcctcagcctcctaagtagctgggattacaggcacacgccaccacgcctggctaacgtttgtatttttagtagagacagggtttcaccatgttggccggggtggtctcaaattcctgacctcaagtgatccgcccacctctgcctcccaaagtgctgggattacaggcttgagccaccacccctggcctatattgttaatctttatattaattctgcttgctgtttttcatttggtgttcttgctaagccgtaatgtttgaaaaactttgttgagatgtacaaactctcattcactgagctaaggagcattcttggaaatatatcattgaataatgtattacatttgggctataatgcacattattttatcatgtaaaaaaagaccttataattcaattgaagttcaaaatatgttacactttcattttgtttcagtctaccattggaataaaccagtttataaaattttttattgagatataacttacataccataaagttcacccactcaaagtgtgcaattcaatgctttttaatgtagtcacaaggttttgcaaccatcaccacaatctaagtttaggacgttttaatcagccgcataagaaaccctgtaactattgacagtcactttccaatcctccccaccccctggctcctataatcattaatctactttctgtctctatagatttgcctactctgcatatttcatacacaaggaatccaatacaatggtcaacacatagtttttgacatgaaaaacgatctgagctgtgtcatcttagaatcgtgtaataggagcatactacttgccaaataagaacaaatccagacttaagtaaggagaggctttattcagtagaactatttcaatagagagaacatgttgatttcagaaacctgaaagactgggctgggtgtggtggctcatgcacataatcccatcactttgagaggctgaggcaggaggatccctttaggccaggagttcaagaccagcctgggcaacatagtgagagcagcattctgagactgttccaatggcaatgatagaactggttaattttttttccattttatattgttaatctatatattaaagattctacaaaaaaataaaaaattagctgggtaggttggtggacgcctgtagtcccagctactcaaggggctaaggtgggaggagtgcttgaacccaggaggtcgaggctccagtgagctatgttggtgccactacaccagagcctgagtgacaaaagtgagatcccatctctaaaagatggggaaaaatgtgcaaaagtttcaaaatccaacagaaaagtcttagcagcaacttttaatgttgggcaagcacaagggcatgatcactggggattgacaggaaacacgtctggcagtggacagctggactctcaagataagctgcaacagaggcatgttctgcattttagggcttgcccaggactggggacaagccagagttcaggaacctgtgggaggagagaggcctgatggaagtgtggtcaagacaatgaagagggtagggaatgggcaattatgaattcttggtcatggtaattaactctaacggactcccaagcttccctgcctatggtgctgggtgataaagcctccttcccactgaaacatactgccaccttccaaaactttcagatatgaagaacaaatctagtaggtaagaatataaagcagaaggcaagctaaagggaagaaaggatcatgaaaagaagggattgtacaaatctagttggcagggaggtgactggaaagcttaataggatgaaagtgggcatcattattttttatcaagctattatggcttacttaatgtgagttttactagtttaaatggttagtttcttgtcagagaacttcatgtaacagtttgattctaaatgctgtgtttgggtttctaatacatttctccttctatttcccttaaatcactcaaaaagccaaaagtcttttagctttccttaagacagtctataagccacgatgagaaagtcacttattcttgttctgagctccaaaattcattataaaatccattcacttttggttggattcctacctagagatcagatttaagattataaaaataattgtgttgctgtaaataggtttcttccctacagacttttctattcctattttctttttatttaaaagataatttactcttgcgtttttgtcagtttcctttttcttgttttatttctgctttacttgttatttcaaaataaagaattgaaggattgtattttttttttaaggcaactgaatttagatgacagatacttgttctaatggagtcactctaaccagcctataaattctaatccagtcatttaaaagaaaattctttccatgggaaaaattgcttttaaatggaactccagtgcccctgcgtgcctaatgagttatttggagcaacatcgctgcagttgtcaggcccaggttgttcatcagtagcccgagatgctagtagctgagcagtgtcgcaccctagggagttatcagggaaagcgtaggtgttcggggtgtctgggatccagagatgagtcagtcgctgtgggagtttctttggcaggtaattttattttccccatggctggagataattactgtgctaaagttctgtgcaaatatggtattaaaaggctatgaaaatcagggtaagcagcctttctttcattccaagtaaaagccagttgtggggaggggatagagtggtatgacagtccaaagaatctttttaaaaaacatattacttactatagattaacccaatttctattccgtgaagctgaacattatttgctttttgttacagttaattgtgtgaggaacacgccggcctttttagccgaaagactgcatcgagccttgaaggttggtctggaaagttcatgtgcattcttagcgtcccttaattcccttgggaaagtatgcaaatagtagaacaaatatttaaaaattagttattttaatgtaatttaaacattttaagataaattatattacagcaaatcaaggtatgatacaatacactctttacacagacacctgattttctcttcaaaataaacagacctgggtttatgaaataatttttttctaagtaggtataatttgatttctatttaactaaaacattctcattttctctaatatgatgagtttaagtagatgctaatattccacttgtatgaaagatgaaaattcatgtataatattaaattttaaaagttcatcctctattttaaatagaaaatgagaaggcaggccaggcgcggtggctcacgcctgtaatcccagcattttaggaggcccaggcgggtggatcacaaggtcaggagttcaagaccagcctggccagacggtgaaaccctgtctctactaaaaatacaaaaattagccgggcgtggtagcagatgcactgtaatcccagctactcgcgaggctgaggcagagaattgcttgaacccaggaggcagaggttgcagtgagcctagattgcgccactgcactccagtctgggcgacagagtgagactctgtctcaaaaaaaaaaaaaaaaaaagaaaatgagaaggtaaaaatatggcttaatgttgatagaatgtcatatttcttttccacttagattagttttctacagtagctaatttgtctactgatttgcctcataggttaatagtattctaacccatatagagataggtacagagaagtattgaccacattattttcactgcttcacagtaagtgcaggcagtaaaacttgttttagaatgccaaacctcaagcttgagacccagtagatcctgtggcctctcaaactgccttgcttaaaataaaccaagctgagttggcagcctttaatgatgccgtaaccctgtgtttgcttgtctgtctttactgccagatggtgcgctccatgagtacagactcctgtttatcctcagaccctagggccttgtgcacagaagatgcttacctccatctctttaccagccattttctgtggtcccacacgtaccttcaaagtcatatcctaagtgaacacatcctttccttcatctcgcccagccccacatctgctccccttcccctgttcagtcatcccagagaatggccccaacaggaatttgcccaactctctgaagtcgtaccattcctccccagacttcttgactatgcctcagccaccccaggcttctttccattcctcaactgtggcaagtctattctcacatcacagtctttgcatccattccttctctggaatgctcatcctctagatctttacctagctgactccttctcatctttcaggtttcagctctcctcctgagagaggtctcccctaactgtaccaggccaattggttccctttcagtcactctccatgccatttccagctttcttttcttcatatttctgatcactatttacttaagcaatagttaatttgctttgctgtctgtctccatctactagaacataagctccatgcagacagagatataatctgttctgttcaccgccattggcacagcacatggaataatgcctggctatagtcgacgctcataagcatttgctggatgaattacatagatgaatggaatatcatttagtatgttggccatcattaggtcaaaatccacctaactgctcagctagaaattttacactatctctctttttcattatcctgtagcgatacatcattatgttttgtcaatccatttacataagcaactctcaaatcttcccattttctccatccctactgcctttattctaaggatggccatcatcatctcttaattactcagtctcctcaagatgagtctcaaagcctctagtcttaactcccttatcttccttctactcctaccttgcaatctgtttctcatgctgcagtcaaagtgattttctgaaaccacgaatttgatctgatctcaacattctcatgtttaaaatattacaagagctctccacacttaggataaagtcagaatttcatttcatggttaacaaggtctggcctttccagacacatttctttttatccctctttgttaacttacgtatccttgaacgtggcgttctttattgccctaaaccttcacgcctgctatttcctctataggaagtttctctcctccctacatgaacctactccttcctcttgttgactgtttagtccttgcttaaatgtcactttctcagacttttcctaatccctaatctttcttaggcccccctgaagtatgctcccatggtacccaatattttcaacatgtcagactgttttgcaatggcttactttcttgcctgtattctttacaaaactggaagcttaacatgggtatctcatctctgctttgcagcatttagcatgatgctgtcacagagtaggtgctcaacaaatatttcttgaataatgaatgatgagtttgataataaatgaaaaagaatcactatagttgaatattttgcacaccattatctgattcttataaatatagatctctatgttgctttgtgaccaatgacatttgtgttgtgaacacctgcattccttaacagggtattggaactgatgagtttactctgaaccgaataatggtgtccagatcagaaattgaccttttggacattcgaacagagttcaagaagcattatggctattccctatattcagcaattaaagtaagtctacttttaaaaatagcaaaacatattttgcccttctctacccatctccttactcttatatgccttaaaatataaagatatttgacttagatttctctctccttgtcaatgtataaatgtgttgtctgagcttaaaatagtagcagcaaaatatcccttattttcagctctaaaatcccaggcatataatagacactcaatatttttttaggtgtactagccactaatttttcttcttttgtgaattacatatgcaagttgtttacctgttttttatattgcactgtttttatttatttcagtctttatgacaatgtaagaaaagaaaaatacgtattttaaatttcctctctgttttacatgagacagcatggttctgcagcttagagtgcttttcatttcagtatataggaaactttctcattttatttaacagctgtatatcattccattgtttgtatatttgtacccaccacaacaaacagaggcttccagtttattgctattgcaaacaatgttgtataatgcatacacaacttcatcaggtacgagtgtatctttgggatgaattctcagaagtaggatttctgagacagatataaatgcattttaaattttgacaaatattactaattgaattccattttgcaattccatgaggaatgtatgagaacttctttctccatagctttggcacagagggtattttcaaacttttaggtttttaaaacattttttagagatggggtcttgctgtgttgcccaggctgaagtgctgtggctgttcacaggtgcgatcataatacattgtagcctagaactcctgggctcgagcagtcctcttgccttagcctccaagtagctgggactataggtaaacttttgggttttcataatctgataggtgaggaattgtatctcagtgtagttgtaatatacatttttcttagtataagtaaggctgaatatattttcatgtttgaaataacatttgtatttctctttctgtgatctgtctttttacattctttgtccacattcttttgggtttttgttctttttggtcagtttctaagacgtttttcacataaggtagattagccttttgtctggtcatattttcccagtccgttctttgtcctttgacttggccaaaagtatttttttccaagcagaggttgcacatcttatttaattaaatttatcaatctttcacagtattttagtttttaaaaaatctggtcccttctgtttctttcattctggatgagaatcttcctaaaatgggctccttcctttctcttttaaagcatgaaacccattttcattgttttcagatctcagttgatatattatacatagaaacttcaaataaattacaaattatttgaattaatagggcagtaagcctgacaaaaattgtacaagaggcttctgtaccttaagctcgtggttcaaaagtcatagtcccaacaggaagatggcaactagttagtggagaactaaggggctagccccacacctgctcagtagccttccattgatttacttttctaccttgatgctccagaccacatatgaaagtctctagtaaatgagtgatagagagtgttagtccaagctggttccctggaacaaagtggaagctggggttggtgagtggagcaatccactgtccttgcctccaaggccacactgaccaggggaaaagacagagtcagggctgccttcgcagaggacttgcaggctatgcagacctctccgtctctttgctactccatctacccttgaatgtctcgaggaaatcagcactagagagtattggacccaggtgaactctccaaggtctaagctgagacttggggcctagaaggtgatccaggatgaagagggaagcagcagccaagcagagtgtttgctctgagtgctgagggtctaaaactgggaatggagtccatgctgattagaccccctaagctgtggatcattatgcaccatgcacatcctgatcctgggtagcagcaccctctctcaagcccctacaaggctggagcactacctctgtgggggagcttacactcagcgatgtcccctggggacacctggcttagaccacattccagtgtccctgccagcagctggagtctttggtccaaccttcgctatggccctacccacaatagccacccttgaacaggcacaaatattagcctgggtctttctgcagctatcttgggaaggtttctgcctctgactttacaaatggcctttgaatgaatgaatgaatgaatgaacatcaatcagtcaactagattcattcactaaaatctctctctctctctttttaatcagagtttttgtttttgcactaaacttttacagaaagagatgctgagatgcatgcataagttgaaatcaggaacttactcaaaaaggcaattctcagactgtgcctgggacttagcacaaattgcatcaactgctcacactcaattctatttgaatcagtcctgacacatcacaatagtttcaatcatcagaggaagattcaataacattaaccatgttgtagctactaaggcagaaaaatagactcacacattttctaaagattgtcagtaacaaggttgagacataaagagggctttcagttcaccctcagcaaaccagaaaattaaattaaccagtggctctccgttccccagtggtctgggtaattgaggcttattgtattagaaaacatttaaactatttgtagtttgatagaaaagaaaaatccatcactgaaaacttcagtttgcagtttgaaatagtacaagatttctttatttctaccacctaacacatattattaagtaatctcattacatttttgctattgaagaacaggatctttttagatggttgtttctgaaattcatgggatagagttccattttgcatatcatctcagcctgtcatcctgcctgttttcttccttccacctattgtttagacatttctttgtccattgacacctttctcagggggtaaccggtgggaaggagaaggcaaggaagaacagaggtgaaaaaccaatgtgtacctcttactactttataagaagatattatggaaaatttagatgaaattatattttttggtagttttccttcatagacaaattctgtatttatttaataaatagcacaattccaagctttttatgggaaaatatagtagccactcacaatcaactcataatctatgtggagacttgaggtaggtatgaagaaacaattagaagataataattgaaacaacagacaattaaatactagattgttgaatatagagctagtactatcggaattgagaagaaaagaagtttggggttagagaaatgggtcttgagcctgcctttcaggtcaacaagcatgtgttgagtgtctcctgtgggccaggtgctctgctggagcatttacctttaagaccccagatcaatagggtcttaaaagtaaatgctctagagacagatatgggaagaagcaagagggaaagaagtaataaggcatttgtttgattagagggtctaccttggggaatattgagaaataaaatccaagtagcaagatgagttcagttgaaagagagctttgagatcagcgaattcactcattcaattaaaaatattatcaaatgcatattatgtgctaggctcagggttacaattataagcaaagggggtagggtgggggaagacattttctgcccttatggaattacaactatgttaaatgtaaaggaaagtgacattgtgctaaaagatcctacaatagtaggacttgacttagaggaaaggcttctatgagaaagtcatgattcagatctggaaaataagtagatattaataaggcaaaatgtatggaggtaagggagccagtagaacattctaataaaagaaatgacaaatggaaaggcctcatggtggaggaagcataatgaaaaatgaggatgtgggggccagatcatgcaggacctttttggcaatgtttaaggaattttggctttagcttaagagtaaggggaagccattgaagagttctgggcatgagctcttgaagagttagtatcaggatcatgaaaagatccctgtaagatcttcttattctggagaataagaagggctcaaaagatatttaggagttgaaacttaagggacttggtataatatcttggtgtgaggaaaggaagatagcaaggatgacactcaagttcctaacttggaaaacagacagtggcgccattccttgcaagaggatcaggttttaggttgtttgtttgtttgtttgtttccttttcttttgggggagtggggggaggtttatgagtttggttttacatgtattgagtttgagatgtctttgagccatgtaagacatgtggagaggtcaagtaagtcattagcggtgtaaatatactttgagttacttggatgtattttcttgactaactggtagaacgcctaattgtttacaactctgatcagagatgtctagaaggagctcttttaatacaaagctggagcattgttgacttgtcagctctgctattgcagagcaagacaggaaaaccaatagcataagaactaaaatctatataaaaacgaagaatattgtcatatattttgtgaaacagacaaatgaacaagaaataaagaaaacagaaaaatatatataaaggcctattgtgtcttactatgaaagtaatgcttaacttcttcactaaatgagccttctctgagacttcctttatattaccactttctctaatattcaccccagtaacagccattccaaatgtgaaacttaagtgataagaagagctcactggttgggttacctcaaataaaataaaaataatgtgagcatcttacacaatccaggttgaaagccaagttttacctcctgtgaagtcttttgcgttacaaacttggtatctttgccctttaagcctcaacctcacgtagtatcttttctggacaacagtctatttttggttggccttgggaaaaggaactgataaacatattctttaaaaatgtggttcatttcactttcctaagttaggcagtgtagcagggtattaaggagccaggatatagggattcaaatcctgcttttgtcacttattctcgataagatttgaggcaagtttcctaacctgtctttctcattttacttatctgttaaatgggggatacgtatagtacctattgcagagagcttttaaaagggttaaagtagttaatacacattaagccttttgaatagcaagtgttcgataaatattattaaaactaaaatttgaagtttttatagaaatcaatattatgtaagtgatgcaatcttattttattaaaccaaaattgaaatttaactgcagtatatcaggaagaatctaaatattacttacagtgaagaagatgctggtcagaacgtaattacactcaggtatgaatgaatgatggaattgcaggtatgttttactaaatggtatagctcatgagtctcacacccaggtgaattccctagtgctataggatttgattcatttatggtctcccattatttatactgtatttgttcttcattgattttattctttgcagtcggatacttctggagactatgaaatcacactcttaaaaatctgtggtggagatgactgaaccaagaagataatctccaaaggtccacgatgggctttcccaacagctccaccttacttcttctcatactatttaagagaacaagcaaatataaacagcaacttgtgttcctaacaggaattttcattgttctataacaacaacaacaaaagcgattattattttagagcatctcatttataatgtagcagctcataaatgaaattgaaaatggtattaaagatctgcaactactatccaacttatatttctgctttcaaagttaagaatctttatagttctactccattaaatataaagcaagataataaaaattgttgcttttgttaaaa

SEQ ID NO: 45 - DNA, 183305 bp, Homo sapiens
  source 1..183305: mol_type = genomic DNA
gccggaagtgcccctcggggcggcgcggcgagggaccggggcctctcctgcaaccgccgttctgtcgccacggatgggaaggagtcgaccgcgagaagaggactgggggaagagggtctcagtgcagacagagttctggaaaagactgttgatatcacccgagccgcagggcaagctgggaaaggtagctcggcacagtccggctgctggactacaaatcccagcatactcctggaggagagggcgaggcggcagccgtgtggcctccacggcctcgaaggagatttgtggggtggcgcgtatgtggggactcggcaatttaaacacatcccgtgaagaaactgccaacaactaagttcccccccccccccccccgctgtatgttccacccttctggagccatcttatttgcggcctggcctcctggcacaagggattctggaggttgtggtttccgaacggatcgagactgacacctgaaggacgcggcttaaccgcttagcccctagcgggtcctgtgggtttcccgacgtctcctgggctgaaatggaagcgagaagtgatcgggaacattgtgctggcagttggatccggctgcaccgagcgccagccttgaaataagtaaaaccgatgcccttccgcccctaacctcaaaagctgcttttgcgtctcgatgttattgagagccggctctgcggtcagctctgagctaggcgctgtgagaacgctcagtaagacagtgtctcgtctggaaatgtacaggcgagattcaaaccgagaaactgccaaaggttgtgtgcagggcagatcctaggataccggagacccagcccgttggcttgacctcaaaactcgggggcttttcggcccatgctgtcccttaattcctcctcctttgctgacgctgtgggtgcgcatcaaagcctaaacttcactagctcccttgcacacaagaacactaaccctaacctgaccagttatttatttttcacttcaagattcttccattgatacttacgtttccctgataccgtccaagtgctgagggcggggatggactgtgtgatttgcatctgccaaatgcagaaaatttggaaggtcagttggtacacttttccgacctagatttcctgatggatgatgctgaagagtggcaagttgctgccaaaaacaaacaaaaaaacctaccatgatttattaatattatttttctaacccctgaatatgggttattgttcatctctgcccgctttccccactccctagtgcttgtctcagaatttttttttcagcgggtatttgagtagagaagggtgtcccagggaaaaaaatggttcttgctttctctaatctgaatattgagctgagctgtgactgggttaacagtagcgtttgttgttgctgctgctgcagcttgtttcaagtagtgccattgtaattaaactccgtgaagagatagcatcttttcttccggagagagtcagtgttgtcacctcagttcacgaattcatgtagccacctccagggtgaaatgcagcccctattccctcaaactaagcccacgaaggcatgttctctgcactttccttaaaaggccagatttttgtctgaggaagtttgaagcagatcttaaaatagatgagaaagctcatttggaattagactcattgacccccatttctctcagcacttatttgtcttgactgacttttttaaacaagctgtgctaggtcctaaaatcaatctgatgctatctcagtttttacctttctagacttctctggtaccagactagtccaggcttacacaaatctcaagtcttacttcagtgatacaaaaactcccaatatgcttaaggtagctaacatgcatttatttaacacccacgtgaatgctctgatcagaagctgagggaagaggtttaaaaaacaaaaaacatgactagattccttgccctccattccctcacagactaatagcaattataatgacaaatccacagtttttcatgctttacatatattaagtatataatgctcacaaccaccctatgaagtaaagtaccattattatactcattttataggtgggtaagtaaagcaaagagattagtgacttgcccaaagtcacacagtaaatagcaaagccaggattcaaacccaaacattttagtttcaaagcccagttcttacctggctatactaaactgtctacttagagagagcaaacattaactgattaaaagactcgtgaatagttagaaacccacgcacaagcagcataggaccaggagacaggaaacctcttgccacttcatagctgggatcctagaccacttgtgtcactgggcttattatctcagctataaaaccagagctcttacaactcttagtaattttttagttcctgagtacaaaataatgaacagatcagccactataatctcaaaactatcacactttctgtataatttgtcccatgctgctttgcattcctgttcaacttttaatgtatattgctgtctcaaccaaacacctcaaagccagagaaccatcttctacttatctccttgggcatccagtataatagtttacatagagtgtgttcttagcagtacttaaagtaaataatttactttaaatgtgacacaaaacagagctatctgattaaggtggaaagattgatttgaagtatcctagatgaattttgaactaggtgtggaagatgctatgggtaaatagtcaaagggagtgggaaaagaaagtgccatttactattgttacaatagtgatcatatgaccgatggaacagactctttgaggcaataagatgccaaattataaacaagacctaaggctgtgtcaggcaagggttaagtcacacatccctacacttgaagagtaaaccatcttctaactgccacaaggtttttctttttctctggtagctaaatagacactggcctggagataagcaatattgaatcaattgtagctcactgaccactagatgctgactaactgtatccccccaacccctgttccacaaaccataactatttctttgattggacaagagactgatttcagtaacatcctagtaagagactaccaaccacagactggttctggctggttttcagaggctgtgcactgagtgtcttcatgtcctttgcttcacctaattgtaatgcatttaaatgttaaatctccaccccaaagagaacataggacatatgtaacatgcatgtttgctcactatgcatgcatgtgctgccccccgctttgtgaataatcaaagctcctgtaacttaagtgtgtattcttagccaactcatttggcataaatttgtgttccactttttcctccctctaaatacctgctttcagtctctgccagagtctacacttcccagcctgtcaggatcaccagcctgcaggctgcaaccctttataaaaagtaaagctcccctctccaaatttataaaccttgggattcttcagttaacactatgtatcttccatatgccagttatggaatttaaaaaatatatatatattgttttattgttttatttttattttatttatttatttatttatttatttatttattttttgagacagagtctcactctgtagctcaagttgtagtgcagtggcgtgatctcgtctcactgcaacctctgcctcccaggctccagcgattcttgtgcctcagcctcccgagtagcggggactacaggtgtgtgccaccatgcctggctaattttttgtattttagtagagacagggtttcaccatgttgcccagggtggtcttgaactcctgagctcaggccatccacccaccttggcctcccaaaatgctgggattacaggcatgagccaccacgcccagccactttttaaaaaaaataattatataaaaaatagagatggggtcttgctttgttgcccaggctgacctcaaactcctggactcaggtgatcctcccacctcagcctcccaaagtgctgagattacagatgtgagccaccgtgcctgactgatattattttatttaatcttcatggttgcctacaaagtagacagtattatctattttatcaaagaaaatactgttacactattattcccaattttatagatgaacaatgaagattttgttagtagcagatgaacatgtatggtttgttaagtttgaaggaaatgatttgacctgtggtacacctaaatcatgttaccataaacccagtgtgctgtatctttgaggaaatcaaaggaaaggggaccaccattaattaaaatccttaactgagtcaagcactatgttgggtatttaatcataccatttaaccctcacaatacatctatgaagtgtgcattacttttattggtgtggaaacagaggctgagcaggattagagtctgtcaactatttctacaaaacatcttaaaaagggcagagccaagactgacctcaaaacccacatcattttcattacaccatatgggctttctatgttgccgtcttttagcgaagtggaacttgttagaaatgcaaattttggggccccatccagacctactgagtaagagggaggggcagaggcagcagtttctgttcacaaacctttcaggtaattctaatacacattcaagtttgagaaccactgtttagcagaagcgaacttgtaagaaccatgtcctttttaaaaaaatgacagttcttgcccaggcatgctggctcatgcccgtaatcccaacactttgggaggccgaggcaggtggatcacttgaggtcaggacttcaagaccagcctggccaacatggtgaaaccccgtctctattaaaaatacaaaaattagccgggcatggtggcatgcacctgtaataccagctcgggaggctgaggcatgagaatcactttaacccaggaggcggagcttgcagtgagccgagagtgcaccactgcactccatctggggagacagagtaagactcagtctcaaaaaaaaaaaaaaaaaaaaaagacgtttcttgatttttttaatttttaattttctttctttcttttctttttttttttttttgagatggagttttgctctgttacccaggctggagtgcaatggcacaatcttggctcaccgcaacctccgcctcccaggttcaagcgattctcctgcctcagccttcctgagtagcagggattacaggcatgtgccaccacgcctagctaattttgcatttttagtagagatggggtttctccatgttggtcaggctggtctcgagctctcaacctcaggtgatctgcccacctcagcctcccaaagtgctgggattacaggtgtgagccaccgcgcccagcctaattttctcttttaaactgagccttgtcttcttattttccagttgattttggttttggattttgtttaagaaagtaattatgtgctcattgaagaaagtagatagaagaaaataaaaatcagctataattctaccactcagcgataattgctattgacattttgatcaatttccttttagcatgtttccatatataagtaccttttttactatattagatcacattatatatttatattttatttttttcattccatagtttcctatttcattgtatattctctaaaaatattcttttagtagttgcttagtaatcagtgctttactgtcaaatgttttatttttaaatgttactttttatatgattagaatgaatattctcttgtattctcttgtgtgcttctttgattttctttcttttttttttttttttttttttttttaagacagtgtctcgccctaccgcccaggctggagtgcagtggcacaacctcagctcactgcagcctcgacctcctgggctcaagcaatcctctcaccttagccttctgagtagctggaactacaggctcacaccaccacgtctggctttttatttttttatttttttatttttgtagagacagggtttcaccatgttgccgaggctggtcttggactcctgaactcaagcaatccacccgcatcagcctcccaaactgctgggattaaaggtgtgagccactgtgcctggcctgatttttttttttttttttttttttttttttgagacggagtctcactctgtcttccatgccggagtgtaatggcacaatctcggctgactgcagccaccacctcccgggttcaagagattctcccacctcagcctcttgaatagctgggattacaagcacccgccatcatgcccggctaatttttgtattttttgtagacacagggtttcaccatgttggccaggctggtcttgaactcctgacctcaggtgatccactcacctcagcctcccaaagtgctgggattacaggcatgagccaccgtgcttggccccatgattttctttctaaggctacgttgttataaatggaataattaggtcaaaaggtatgaatgtttttacagctagagagccaaagtaccctccaggagattgatattgatttgttctccattcactgatccagtaaacaaatatttattaagcaccatgtgctagactttagaaagtttattacaataaacaaaatagttacactccttgccttcaaggagcttttggtggtttttgtatccttttttttttctttgagacagggtcttgctctgtcacccaggctggagtgcagtggcatgatcataacctgaggctttcaagggatccacccacctcagcttcctgtataactggtgcacagcaccacagccagctaattatttcttaattttttgtagagacagggtgtttctatgttgcctagtctgatcttgaactcctggcctcaagcaatcctcctccctcggcctcccaaaggcttgggattacaggcatagccactgtgcccagctagagcttttgatcttaaaagaaggcattaaatcctaagtatttccatacccttgccagcactgagtttgtgcagtttaaaaagaaatcgatttcattttgttaggtaggaatggtgttttttgttgtcattgtttaaattagtgaggctgaacaatttttcttgttcatttatttattcatcagttgtttattaagaatctgttatataccaaaacaatgctaggcactggaaatatgataaagaagatggacatgtgttttccttcacagagtttataatgtagtaattattggttgtgtatatttcttcatttctaaattgtatcctcttccatttttccattggagcatttatttttaagaattgatttgagagtgttcctttattcaatcagtatgtagtgaactaccatgtactaaacaatatggtgcaaaacaaacagatgaggaaaagaacaggtgaggatgttagccaggcatggttccatgtgcctagagtcctacccacttgggagaatgaggcgagaggattgcttcagcccaggaacttgaggttgcagtaaactatgatcacaccactgcactccaccctaggggacagagcaagacgtatttttgttttcttagagattttcattaccttgtctagtttcttttgattcttacttgccttactgccagctcttcctttttacctcaatctgtatacttcatatattacctgttttttagtatccatttgtcttgttgttgttgttgttgtttttgagacagagtctcgctctgtcgcccaggctggagtgcagtggcgcaatctcggctcactgcaagctccgcctcccgggttcacgccattctcctgcctcggcctccggagtagctgggactacaggctcccaccaccacgcccagctaattttttgtatttttagtagagacagcgtttcaccatgttagtcaagatggtctcaatctcctgacgtcgtgatccccccatctcggcctcccaaagtggtgggattacaggcgtgagccaccgcgcccggctttttttttttttttttggggggggggggcggggagacagagtctcactctgttgaccaggctggagtgcagtggcgtgatctcagctcattccagcctcaacttcctgggttcaagcaatcctgcctcagcctccaaaagtgctgggattacaggcgtaaacccccatattctcggcctttttattgaatttttattgcaaacataaagtagttttgttttttgttttttagatggagtctcactctatcacccaggctagagggcagtggcacaatctcagctccctgcaacctctgcctcccaggttcaacagattctcctgcctcagcctcccaagaagccgggactacaggcctatgcccagctaattttctgtatttttagtagagacagggttttgccatgttggcaagcctggcctcgaactcctcacctcaaatgatccactcgcctcagactctcaaagtgctgggattacaggcgtgagctaccacgcccagcctcttcctcatcttgagtgctgtgttttctttttatatgctgtagaatcttctcataaacctatgaggtggttgtaatttttttctgtttactcatccttagatgagcagtgttgctatgagtcaatctttttcttttaaagacttttaataggttgttgggagaagcttagggatctctagtcagatgacttcttaaattagaacttaagacttttcattttgaaaaccggttgtgctgactggaatgggcacattaaagaattgaactaaggctgggcgcggtggctcatacctgtaatcccagcactttgggaggctgaggcaggcagatcacgtgaggtcaggctttcgagaccagtctggccaacaaagcgaaaacccgtctctactaaaaatacaaaaattagtcaggcatggtggcaggtgcctgtaatcccagctactcaggaggctgaggcaggagaatcagttgaacccaggatgcggaggttgtggtgaacccagacagtgccactgcaccccagcctgggcgacagagcaagatttcgtcccccacaaaaaggaaagaatttagctaagacgtctttgttatacttgacataaaatatagagtggggttcctgaaatggtcagggaatattcctggcctaaccttagtgagacatgtattcttaagatctttctcccttagttcacagcctcttagttggatgcccctgtgtcacagaacacattttggctatggggtgtgatctgtgtctgaggaacaacaagaagctacacgtcatccacacaggagccaaatctggaactctggtctcagttcttcaggactatttgagcgaataatcactcaacactggagtaaaggatgttctactagaagtcttattctgactcctaaaaccacgctaccgaaagtgttgatccacaaaccagtgccagtgcttgaactttgttactggtccacagttaggtaagtacagaaatggagaataaatgtgaagtatgcgtaaatgatatatgatttacagtccaattgagatgcttcaggagtgaaagtggggacaatgaaaattatgctaggacaaaaatcattaactggactgtccaggtaaactggaacatatactcacctcatccttagatttcactagcagtagagtcctggggacacaggaaccaaatgccctcctgcatttctccattcctgagaggaaaataccctaattcctgaatcccagcctccacatacttcttaggatagcctagcaattacccctgggccccttgtgacaccatttcctaaaccagccctggaaactcacttatgattggacactatgtcttgccctcttgcctaagctgagaactcttaaaaatgactgtctttcccctagagggtattttggagggccaggcaccagtccttagccatgcctccttgtgaagttttaaaatatgatgcttggttccatatgaaatttaaagtagttttttctaattctgtgaagaaagccaatggaagcttgatggggataacattggatctatacattactttgggcagtatgaccattttcacaatattgattctttctatctatgagcatggaatgtttttccatttgtttgtgtcctctcttatttccttgagcaatggtttgtagttctccttgaagaggtccttcacatcccttataagttgtatacccaggtattttattctcttagtagcaattgtgaatgggagttcactcatgatttggctctctgtttgtctattattggtgtataggaatgcttgtgatttttgcacattgattttgtatcctgagactttgctgaagttgcttatcagcttaaggagattttgggctgagacaatggggttttctaaatatacaatcatgtcgtctgcaaacagagacaatttgacttcctctctttctatttgaatactctttatttctttctattgcctgattgccctggccagaacttccaatactatgttgaataggagcggtgagagagggcatccttgtcttgtgccggttttcaaagggaatgcttccagcttttgcccattcaatatgatattgggtgtgggtttgtcataaatggctcttattattttgagatacattccgtcaatacctagtttattgagagtttttagcatgaaggggtgttgaaatttattgaaggccctttctgcatgtattgagataatcatgtagtttttgtcattggttctgtttatgtgatggattatgtttattgacttgcatatgttgaaccagccttgcatcccagggatgaagctgacttgatcatggcagataagctttttgatatgctgctggattcggtttgccagtattttattgaggaattttggatagccaagacaatcctaagcaaaaagaacaaagctggaggcatcgcactacctggcttcaaactatactacaaggctacagtaaccaaaacagcatagtactggtaccaaaacagatatatagaccaatggaacagaacagaggcctcagaaataacaccacacatctacaaccatctgatctttgacaaacctgacaaaaacaagcaatggggaaaggattccctatttaataaatggcgatgggaaaactggctagccatatgcagaaaacagaaactggaccccttccttacaccttatacaaaaatgaactcaagatggattaaagacttaaatgtaagacctaaaaccataaaaaccctagaagaaaacctacgcaataccattcaggacagaggcctgggtaaagacttcatgactataacaccaaaagcaatggcaacaaaagccaaaattgacaaatgggatctaattaaactaaagagtttctgcacagcaaaagaaactgtcatcagagtgaacaggcaacctagagaatgggagaaaatttttgcaatctatccatctgaccaagggctaatacccagaatctgcaaggaactcaaacaaatttacaagaaaaaaacagacaacccaatcaaaaagtgagcaaaggatatgaacagatacttctcaaaagaagacatttatgtagccaaaaaacatatgaaaaaaagctcatcatcactggtcattagagaaatgtaaatcaaaaccacaatgagataccatctcatgccagttagaatggcgatcattaaaaagtcaggaaacaacagatgcaggagaggatgtggagaaagagcaacggttttacactgttggtgggagtgttaattagttctaccattgtggaagacagtgtggcgattccaaaaggatctagaaccagaaataccatttgacccagcaatcccattactgagtatatacccaaaggattgtaaatcattccactttaaagacacatgcacacatatgtttattgcggcactgttcacaatagcaaagacttggaaccaatccaaatgcccatcagtgatagactagataaagaaaatgtggcacatatacaccatggaatactgtgcagtcataaaaaagatgagttcatgtcctttgcaggaacatggatgaagctggaaaccatcattctcaaaactaacacaggaacagaaaaccaaacaccacatgttctcactcgtaagtgggagttgaacaatgagaacacatggacacagggaggggaacatcacacactggggcctgtcagtgggtagggagctaagggagggatagcgttagaagaaatacctaatgtagatgatgggttgatgggtccagcaaaccaccatggcatgtgtatacctatgtaacaaacctgcacgttatgcatatgtatcccagcacttaaagtataattaaaatatatatacgtatatatatatatatacacacacatatatatgtatatatgtatatatatacgtatatatatgtatatacgtatatatatgtatatacgtatatatatacatatatgtatatatatgtatatatgtatatatatgtatatatatgtgtatatatatgtgtatatatgtgtatatatatgtgtatatatgtgtatatatatgtgtatatatatgtatatatatgtatatatatatgtgtgtgtatatatatatatgatacttggtcataaccgctgaactactgaatacagtattgaccccagttcattagaaacttcagagtttagtgcttctctgcacatattttccaaatacagtagttcctttttttttttttttttttgagatggagtcttgctctatcccccaggatggagtttagcggcctgatttccgctcactgcaacctccacctcctgggttcaagctgttctccctaagcctcctgagtaactgagactacaggcatgcgccaccacacccaactaatttttgtatttttagtagagatggggtttcaccatgttggccaggctggtcttgtactcctgacctcaggtgatctgcctgcctcagtctcctcaagtgctgagattacaggtgtgagccactgggcctgctcattagttcttgctggtgtaacaggagggcagagattaggccacagtagaaatctacagcctttcagctggaaacaactgtgaaatatcatacactgtgagctattatagtggctttacaatgtttttactgatataatcactatattcattttttttttttttttgaggtggagtctctctgtcaccaaggctggagtacagtggcgcaatctcagcacactgcaacctccacctcctgggttcaagcaattctcctggctcagcctcccgagtagctggcattacaggcacccgccaccatgcccagctaatttttgtatttttagtagaaacggagtttcactgttttggccaggctggtctcaaactcctgaccttgtgatccacccacctcgacctcccaaagtgctaggatttacaagcatgagccaccgtgcccagcacactacattaatttttaacaccttgtactcgctcatatattttaaagttgacatatagaaattttcatcacaactctaaataattacaaaggatatttctggcatcttataaatactgatattataaaataaaacttacattactatttttaatgtacgcaatggagactaaataccacatattcgatggactatattcaccatcatcctacttattctccaacagttagaaatttcacattattgctttttcttctagaacatatatttttgcctccccaaatattttattctaaagtaataattttatgctgggaattcatttattgattttatattataattctctacaacaacatatggatatacatgtaaatttaagcttttaacttcctgtgagtataagtctctaagtgttaaaatttttcttctggattgatttatgctacttattaactttatacaattgattagaacagtatatgtataatacaaattttgataaacacaaaaaataaaaatatattggaaatgcatttattcacaagatgaatggggatttaaaaatttttgttcactaattctatcaattccatgcctatttaaaaattttttatagatataagcattggggaaacttgttcaatatataagtggatgaggcttgaagaagttccctttaatactattacttttttctttgcactcctgaaatatacgcaaaaatactcaaaggttttattctcaaaaattattcttaataatgtatcaactttaacttgaacgatcctctttaaattctgtcaaaagcaaaaaaaaataggcggggcacagtggcacacacctgtaatcccagcactttgaaaggctgaggcaggaggatcacttgagcctgggagttagagaccagcctggccaacatggcaaaaccctgtctctattaaaaatacaaaaaaattagcttggcgtggtggcacactcccgtaatcccagctacttgggaggctgaggcaggagaattgcttgagcctgggaggcagaggctgcagtgagctgagatcaccccactgcactccagcctcggtgacagagcaaggttctgtctcaaaaaaaaaaaaaaaaaagcaaacaatagaagccgctccttgcagacatttattccccagctgttgaggctgttcataccctcaccttctaggaaagatatcaaaacagtttcacgaagatttaacaaatgactgctattatttctcttagaggtaccttgtttaacccagtattctcagggagagttcagaaaatagaaataatgttcatttcaaagcaccttttcaatacaatatttcttggtaaaatgctgttcttataatgtgatttaaatttatttttatttatttattcatttgtttacttttttttgagactgagtctcgctctgtcgcccaggctggagtgcagtggcaccatctcagctcactgcaacctccgcctccctggttcaagcgattctcctgcctcagcctcctgagtagctgggattacaggtgcgcagcaccacacctggctaattttttttgtaattttagtagagacggggtttcaccatgttggtcaggctggtctcgaactcctgacctcatgatccacccgccgtaggctcccaaagtgctgggattacaggcgtgagccactatgcctggccactttaaatttatttttgtcaaacctgaggagatgcaggttttgctcatttaatttatgaaaatgtatctagttagtaaagtcagtcctatttgtgaaacaaacgaggtaaatcagagttactttgtgaaaaaaagtctaacttcttttttgtctaagctcattttcaatacaaatatgtgttcatatatgtttcaagaaagattataaaccattgggaaataaattagagatagcatctagaaacattagtaaagacaagacgaaagttagactgctctagtgtaattggcttctccactttatgttataaaccaagatgaaaagaatatgctatttattacttattttgaaacaatgcactaaaatgtgtcactaaagttacaagtaagtcattaagtgagcagtatgattaaaggcattgtatgcttctcttatttatttgtttattatctcttcttttagagagaagggtctcattctgttgcctaggctggagtgcagtggtgtgatcaatagctcactgcaaccttgaacttctgggctcaagtgatgcttttgttactatgtatggcatgtgtcaaatacaagtatttggctttcagaatagttaagtaagaatcatgtataaaaatcagcaatagagcagggcatggtggctcacgcctgtaatcctagctctttgggaggctgtagcaggaggattgcttgaggccaggagcttgagaccagtctgggcaacatgatgagactttaaatgtagagctttcgtgcttgcaagaaagaaatgtgagtttgcaggtgacagaaaggaagcaggtcttgaaatcagagggaaaagattccagctaccattgcaattgctggtggcagtgggggctggggagaaaatgtcataagtcaagaacttggattttaaggcatacctaggaatgaagcaccttagtcctgggcctggtacagacagataatcctgtgtgaagctggaactctcaaagagtggcaccctcagtgaaaggacacatagcaaaaaatctactcaccagcccagagaggtgacaagaaaatacatattttcttgtctatctgtgtgtatgcatgtatgcacatatgtatgtatgtatgtatttcttgtctgtctttatatatgcagaagaaagagttagaaaaaagaatttctgcagagtcattaaaaacccagacctgcttttcacattgcttttgactttgcttaatactctctttgtggtcaagaaacacttaaattaagaagttaacataaaaattgattctgggccaatggtaaaccctagaggcacttacaggagcaaacgtaaaatcactctggatactccttcaaccaaggtcacatgaaggtctcatagactaaaacaaatcaatgtaaaacagagttcatagaaaaacagcgtaaaacacaagaaaaaaatcacccataagctcagttaagagaacaaaacaagagcactggagccttaaaatcctgaaacattagactaacattctaaaaggtgatgtaaaataagtattgtttaaaataattacaaatgaaataagaaatcaaaaccctatgattaggaaaaagagtgtatgaagaaacaacagataaatctagagaactaccaaagggaaattttagaaatgaaagacataatcaccaaaatttaaagcaaatggttaaatagcagataagacacaattaaagagaaagaaccaattaactagaagttaaagctgaggctatttgccagaagggagggagggagagagagagagagagagagagaatatgagtgaaaagttgagatatggaagataggaacatactcaaaatagaagggagagataagagagataatagaagggagggggaagatgacaatggctgagaatgtccaggactgaaaaaagatgtaactcttcagattccagaagcataagtcctaaaagcatagagaaaagcaaatccacatatagctacatttactgacaaagacatacagacggacttaagaactcaaagagaggaaatatagattactcacaagaaaacagcaattagacagaagacttctcatgacaacaatacaggccagaaacaaaggattaatatcttcaaagtgggtaggaaaatataaaaataaatctagaattctgtacccagttaagcatacttgaagcataagatgaaataaaggaagcttcagacaaaaaaaaaaaaaaaagctgagaaaatttaaactcatagacctttcctaaaggagctactaaaatttgtatttcagaaagaagaaaatcaaactcaggaagaaatgcaatgcaagaaactattattaaatgaaaaagagtaattaggcacagtggctcattcctgtaatctcagcactttgggaggctgaggaaggaggattgcttgagcccaggagttcaagaccaccctgtgcaagatgatgagaccccagatctaccgaaaaaaaaaatgcagtgagctgtgattacagtgagctatgatcttgtcactgcactccagcctgggtgacagagtaagtcccgatctcaaaatttttttaaatctcacaaggacaagggaagaagagagaaaaaataataagagtttggaacctggaaagcacgtggacaggtgataactgacttagcagacctgagaaagctgactttcaaaccagtagtagggaaaaccaagaagcaacatgacagtaggatttctcggggtaagagagttttttttgcactggatacgtctgaaagtgggtgtgtaggtgagactaaacccaggacgatttcttgtaagtctgtacaagaagcagtcagcatccccaatactgcacagcggccactgtccctcttccacgagggtggatgattggaagcatgttctctgaagaatcatgcagtggctctctggaatggggacaccagatgtagtcgaggtgttctggctatctaaggttgcctaaaaaaccaccccaacacttgaaggttacataaaacagtgaccattatatctcatgattttgtgggtctgaatttgaactgagcaattcttctgtcccacctggcatcaagaaaggtcacttggtgttatccagctggcagatggaccagtctggagaactcacatattgggtaccatgataagaagagctggaaggttggtctcaactggcactgtaaactagagcatctacacatgccccttcacatggcaggctcagggtcagatttccttcatggaggctcagggtttccagaaaggatactccaagacatccaggcagaagttacaagccttcctatgcacgcttggaagctgttgaacattatttctgttgcattctataaatcatgccagtcactagggccagtctagatttaagggaaggggattaggctccatccctgagtggggaggggtgggagggtgcaaagaatttgcagccatctttcatcaaggccatgagattaacacaagactagggctactgtactgaaattgaagagccatatgaaacttaagatgatgtctactgagctgcttggtattcttcctgcttggctcctagaactctggcagccaggttcaaactcaccaggatggagaatttggaatacttttctttggggactctaagaggaaagacctgaagagatgtaatcatttatgcaatgaaactggagcaacctgttggtaaactcacccttgtcaagccccacccacttacacacgcactcagggcttccaggcagctttgtagacctcactcttagggttgcgagataaaatacaggacacttagttaaatttgattttcagttaaacagtaaataattttttactaaaatataaaatactcatgtactataagtatgtcctaaatactgcatgagacatacatgtactaaaaattgttgtttatctaaaattcaaatttaaccagatgtcctggtttttctttttcttttttttttttttttttgagatggagtctccctctgtcacccaggctggagtgcagtcgcatgatctccactcactgcaagctccgcctcccaggttcacgccattctcctgcctcagcctcttgagtagctgggactacaggcgcccaccaccacgcccagctatttttttttgtatttttagtagagacggggtttcaccatgttagccaggatggtctcgatctcctgacctcatgatcctcccgtctcggcctcccaaagtgctgggattacaggcgtgagccaatgcacccggccttttttttttttttttttttttttttttttttttgctaaatatagcacacttacataagagcagagccaaaggtcatcacaatataagggaaggatctgacaataaagatagaatccaaaacacgctaacagagaaaatgaaatgaggaagaaaaagactatggggagaagaaaactttgagaaatctactattgagcttctctgagaaagatcagaaatgctgggcatggtgacacaagactgtagtccctgcttctccacaggctaaggtaggaggattgcttgagcccagtttgaggttgtagtgtgctattatcatgcctgtgaacagccactgcactctagcctgggtgacatagagagaccctgtgtcaataaaaaaagaatactctaaaaaatgaacactcagagaaccaaatggagttcttttaaattaaaaatctgatagcaaaaatgaaaaactcagtagaatgttaagaagataaagttagaaattatcctagaatgcataggcaaaaggcaaagagaagggaaagaaataagaaaggttaagattagaaagccagccctggacatctgggaaacaggggaagaaatgaattaaataattcaattatatattttgagaactaaagagcatgaatttccacattgaaagtgctgagtacagtgcaatggacaaaaccagaaccacaccagggcacgttgtgatatggaagactgaggacatagagaagatcttacaagtgcctaggaggaaatgaagtttcacttaaagaatccagaatgagaatggcatctgatttctcagtagcaacacatgaaactgaaagacaatggaataatgtctttaaaatctgagggaaaataacttccaacatagattctcatacccatccaaatgtagtagtaaagcgtgggggtaaatgtatttcagacacgtacaatttcaaaatatttatcttccatgtaccttttttcaagaagctttcagaaggtgaaagcttttccaccaaaataaggacataaatcaagaaagcttttgtgtgtgtgtttttttaaatgaatagcaaaatgaacaactaaaaattgaatggtggggaagggtaataagctaacactatagttacagctttctaaagtactttctagagtacacctaacatttacttactatgtgcacttactatgtgccagtcattattctaggtgattcacatcaatggtatcaatcagttaatcttcacaacagctatatcagttacattcttgcatagaataggtgtcagtaagtattactattgacggtatacaattgttattaattcaacaagtcacattaaacttcctgcagcagactgtatttttcaaaattggcagcaacagtatgttcaatcccatgtgctcttccaaaaaccctaccccctacctcaatcaagagatggcatctatgtcctttccccttgaacccaggtaggcttctcggacgggtttctgtgactgcacctctaaagtaatgctatgttggccaggcgcagtggcttatgcctgtaatcccagcactttgggaggctgaggcaggcagatcacttgaggtcaggagttcgagaccagcccggccaacacggcaaaaccccgtgtctactaaaaatacaaaaattagctgagtgtcatggtatgcacctgtaatcccagctactcaggaggctgaggcaggagaatcacttgaccctgggaggtggaggttgcaatgagctgagatcgcgccactgcattctagcctgggtgacagagcaaaactctgtttcaaaataaacaaaaataaataaagtactgctatgtgactttcaaaaccgcatcttgaaaggtagtacagcttccatctagctctcttgctcgtaatatgtgcctttggagcatataagtacatgaaaccaccgtgcggcagagatcacgtgaacagaccacgttaaaatagagtccgaggaaccctggctgttgaagcccgcagcggtttgagttttccctgtcccagtgccagacatgtgaatgattctgaggccctcaagatgactccagcattatccctgtctcatggcagccaggcaacacactctgagtggtaccacctagctgagtccagtcactcaccagaatcatgagagataacaacaataaatgattgtttcaatcatctgcctgggcgacagagtgagactccaccccagaattgtgggtgttatttttttggagcaatagacaagcagaacatttccagataaaagtgagttttagcctagacttctgaatctcctatccctatactcatttaaatagcccaaggcatgtaaagaggggaatttttatccttagtggcaagtctcctttctgatactgtagctgaatccaaagcttgtagacacaagtgataaaaaaacagattaattagatttcatcaaaattaagaactcttcaaaacacacttaagaaaacaaaaagacaacccacagaatgggggaaagcatgtgcaagcatatgtctgataaggtacttgtactcagaatagataaagaactcttacaactcagcaataaaaagcaacaaataacctaatttaaaatgcacaagggccaggcatggtggctcacacctataatcccagcactttgggagcctgaggcaggcggatcacaatgtcaggagttcaagaccagcctgggcaatatggtgaaaccctgtctctacaaaaaatacaaaaaaatagcggggcgtggtggtgggcacctgtggtctcagctacttgggaggctgaggcaggagaatcacttgaacctgggaggcagaggttgcagtgagccaagatcacaccattgcactccagtgtgggctgaataggtatttctgcaaagaaggtacacacatggccaataaacacatgaaaaggtgctaaacatcattgattattagggaaatgcataccaaaaccacaatgagatactactttacagccattggggtagctgtaattgaaaaaacagacaataacaagtgttgacaaagatgtggagaagctggaactttcatacaatgctggtagaaatgtaaaatgtgcaactggtggaaaacagtttgctagtttctcaaaaggttaaacagtatcaccatatgacacaggaattccagtcatagtgatatacccaagaggaataaaagcatatgtatgcaaaaaaacttatacacaaatgttcatagcagcattattcatagtagccgaaaagtggaaacaaccaaaatgtccagtaactgatgaatggataaacaaaatatggaatattcatacaatgcaatattattctacaatgaaaaagaattaagtactgatacatactacaacatggatgaatctttaaagcattatgctaagtgaaagaagccagtaacaaaggaccacatataatataaaatatcaggctgggtgtggtggctcatgcctgtaatcccagcactttgggaggccaaggtgggaggatcacttgaggccaggagtttgagaccagcctggccaacatggcaaaatcctgcctctactaaaaatacaaaaattagctaagcgtgttggtgcacacctgtagttccagctactcaggaggctgaggcacaagaatcacttgaacctgggaggtggaagttgcagtgagctgagatcacatcactgcacttcagcctggccgatagagtgagactccatctcaaaataaaataaaataataaaataaaatgaaataaaataaaataaaataaaatagtaaaataagcaactctatggagatagaaattagattagtggttgcctaaagctgaggaggcagagagggtgggaaggaaatgaaagagactgctaatgggtacagcatttctttttgaagtgatacaagtgttccaaaattgattgtggtgatggttgcacaactctgtgaatatacaaaaaactattgaattgtacacttcacacaggtaaactggcacgtgaatacctcgacaaagctattgaaaaaaagaaagagatccttttgtagttcatgggcataatgattggtattcacgcacatgtgtgagatgtgccacactcaaaccttgttatgacctcggcacattacccatctgacctgaaaaaaaaaaaaaggaaagaaaaataaaagtcccataaaagtgttatagactgattcagtccgatgtacaaaatactctggcctatctgtagagaactggacaggatatcctgtgatgtgatgtatggggatgctgtggcaacatttatgtcagttcttctctctcttttttgtctcttttgtccttttcttctcctctccacatagcatgtgatctattctttattatcagttatctattgacccaacaatgtgggtaacaaagcacctgaagactcatttttattgctcccaaggccatggcagctgagccattcttcctgcttagatgggacttgctgctgcacccggaatcagcagttgatcttggctgggctctcttgtgtattgggggttgactggaatttgtgggactaggatggtctctgcttttctccatgtgtctttgcattcctccattgggctagccgggacaagccgtcatgctgaggcagagatgcactagtgagcatgcagaaatgcacaggtgcttttcaagtccctgctcgtctcatgtctgataacattccattggcctaagtatgttaccagaggaatgttcagtaacaggaggaagggacaataaaattacaaggcaaagagtgtggagccgggtagcctttaattggggccattaatactatgcatggaccggtttataagtccatgcttatctgttttataaactctaggttgtttactaaagattatgaattcagtcatttcccctccaagtgaaatttttttctatttttatttgttattacagaagtataaggaatgagtcagagaacatagacaagctaaatgaagacaaagaagtatgatatacggcatggtggctcatgcctgtaatcccagcactttaggaggctgaggtgggaggattgcttgagcccaggagttaagaccagcctggggcaacatagtgagaccctgtctctacaaaaaatttttttaaaaaaagtatgaattgtccctttcctagagacaatcactcttgagatacagtcttccaggtatttctctctacatttgtgtataggtaaatatacacatatatatctttctcattatatatgtatagacacatacatgtatgtgtataataaaaaatattaatttagaaccgtcatttcatcttgatgaagttaggtttcactgagtgatatgtaaaactcaccttctgcatgtggaaattcattgtcttcaggcacagccatattacgctgtgtataactcctgtctgtggaatgagacactttggcttctgcagcaggcttgccttctggtattcacgtggtcagtaatattaccacatgtcccacaagatggtaaacgctgacacacaaatgttatatagtcatcatgtattttcttgagaaattaaaattatttatttaaacatatactttatttccattccttttgagcctttttttttttttcttgaaggcagagtctcgctctatcacccaggctgcagtgcagtggtgcgatctcgcctcactgcaacctccgcctctcaggttcaagtgattctcctgcctcagcctcccgagtagctgggattacaggtgtgtgccaccacgccggctaatctggctaatttttgtatttttagtagagatggggtttcaccattttggccaggctggtctcaaactcctgacctcaggtgatccacccgcctcggcctcccaaagcactgggattacaggcctaagccactgcgcctggccttctttgagcccatttttgtcaaacaatttattaccagtataagggtgtaaccaaacaaatttttgtttataaagaatcataaggccgggcgcagtggctcacgcctgcaatcccaacactttgggaggcagaggtgggcagatcactggaggtcaggagtttgagaccagcctggccaacatgatgaatccttgtctctactaaaaatacaaaaaattagccaggcatggtagtacacacctgtaatcccagctacttgggaagctgaggcaggagaattgcttgaacccaggcggcagaggttgcaatgagccgagatcgcgccactgcactctagcctgggcgacagagtgagactccatctcaaaaaaaaaaaagaatcatagattttaccatacaataaataccaaaaccactgtaacaagagtgtccatgtaccttctatattctttattgcaggactgttcagcctttatttcctgcacatagtttatataatctaatctagaatttctcatgtttcccactgactctgttgcctggctggcctcatcctactgtcttgtataccaaatagttatcaggagcaggcacatctaatacttctcccaccgctactcaagattgtaaagacttcaccttccttgccttattttactgataagtgcccagcagactgcccttgaaagagacttaatagttatcttgcctctgggaagagttggggggaaaagtactgatcattactagtgatattccacttttaaccttgtgtcacaaacctgtgtttgctgcacacgtgtcttatacactagagacagggtaggaactgaagcacaaagtgaaagtttaccaaaatcattccagcatattataaagcaactatgaatatgtggctaaaaaatgacaaatggccaggcacggtggctcatgcctgtaatcccagcattttgggaagtcgaagcaggtggatcactagaagtcaagagatcaagaccatcctggccaacatggtgaaaccccatctctactaaaaacacataaattagctgggtgtagtggcacacacttctagtcccagctacttgggaggctgaggcaggagaattgcttgaacctgggaggtggaggttgcagtgagctgagatcgcaccactgcactccagcctggcgacagagcgagactcaatctcaaaaaaaaaaaaaaaaaaaaagacaaatgagacaaatgctaaaatagagatggcgactggtccacagtaaacttgaagcaaggtcaccctaattataaagctatagtaactaagacaatgtggcatgggcacagggatagacaactggcagaatagagagaccagaaattgacctatggataaatggagacctgatagatgacatatacatggggaagagtaaatagtactggaaaatttggttatctacggaaaaaatgaaagtggacccttaccttacatcaatcataaaaatcaattcagggtcaggcgtgatggctcacacctgtaatcccagcactctaggaggttgaaacagggcagactgcttgagctaaggagtttgagaccagcctgagcaacatagtgagacccctgtctctgccaaaaatacaaaatttagccaggcatgatggtgcacaccagtaggctcagctactcaggaagctgaggtgggaggatcacttgagcccaggaggtcaaggctgcagtgagccaagatcacaccactgcactccagcatgggtgacagagtcagactccatctcaaaaaaaaaaaaaaaaaaaaaaaagaagggaataccatcaataatcaattcagaatggacctaaaatgtgaagagcaaatgttttaaatatttagataatagaatgagtagaatagctttatgactttggggtggagaaggattccttaaataaaacacaaaaagcacaaacctttaaaaaatgataaatttgagactacattaaaatcaataacttttgtttataaaaataccataaaatgcataaaatgacaggctaaaactcaatcaaaatatctgcaactctagtaacagtaaagtttagcatcctgaatatgtaaagaactcctgtgaatcaataagaaacaacacaagagaaaaagcaatgcaaaaaagacctgtcaagacattttacagaataaaaaatatgaattgggcatggtggctcatgcccataatcccagcactttgggaggccaaggctggtggatcatctgaggtcaggagttctagactaccctggccaacatggtgaaaccctgtctctactaaaaatacaaaaatacaaattaaccaggtgtagtggcgcatgcctgtaatttcagctactcggggggctgaaacaggagaattgcttgaacttgggaggcaaaggttgcagtaagctgagattgcgccactgcactcctgcctgggcgatataatgagactccatctcaaaaaatatatatatatacacacatatgaattgtgaataagtacacaaaaaagatgcttgacctcattcatagtcagggaaatgcaacaccaatccttggtaaggcatgctatcactgctaaagagtcagaaaccaacaagtgttgataagatgtggagcaactagaactctcattcactgcaactgagagtataaactgtacaactaatttgcaaaacagtttgatattttattaaaagtgcaaaaaccttatgactcagtgattcaattctcacatgtttacatcctagaaaaactcttgaggatgggtagcaggagacatgtgggaaatgatcttaaaacattgtttttatagcaaacaaacaaatataattggaagcaacccattatttatagattggagataaattgtgggatattcatgaaccacagttacatgatcaacatggttgaatataaaacactactgagtgaaaaaaattatgtactttattatgtattttatttatttatttatttatttattgagacagaatgtcgctctgtcacccaggctgaagtacagtggtgtgatctcggctcagtgcaacctctgcctcttgggttaaagtggttctcctgcctcagcctcctgggtagctgggtttacagttatgtgccaccacacccaactaatttttgtatttttagtagagatggggttttgccatgttggccaggctggtcttgaactcctgacctcaagtgatctgcctgccctggccccccaaagtgctggaattacaggtgtgagccaccacagccagcctattatgtattttaaacaatattatgtatctaataaatacattatagtataattttgtttatataaattataccttttaaaaacagcaaaaccaaacaatatttttgtggatacctacatgtgtagaaatagcataaaaacatgctagtaaatgccaaagaagatattcagaatgatgactatgcatggggagagagggaagtaaatgggtttggggagaggttcataaacagtttcaacagtgttaatcactttgtttttttaaagacctgaaacaattaagggaacacactaatattttatgacgctggtagtggctttatggaaagtcaatattttttttctctatatagtcaattagtatacataacatataaaaaaaaaagctcatcgtcactggtattagagaaatgcaaatcaaaaccacaatgagataccatctcacaccagttagaatggcgatcattaaaaagtcggggaacaacagatgctggagaggatgtggagaaataagaacacttttacactgttggtgggagcataaattagttcaaccattgtggaagacagtgtggcaattcctcaaggatccagaacgaaaaataccatttgacccagcaatcccatatacccgaaggattataaatcattctactataaagacacatgcacaggtatgtttagtgcagcactgttcacaatagcaaagacttggaaccaacccaaatgcccatcaatgatggactggataaacaaaatgtggcacatatacaccatggaatactatgcagccataaaaaaggatgagttcatgtcctttacagggacatggatgaagctggaccatcattctcagcaaactaacatgagaacagaaaaccaaacactgcatgttctcactcacaaatgggagttgaacaatgagaacacatggacacaaggaggggaacatcacacgctggggttgggggttggggattggggggctaggggatggatagcattaggagaaatacccaatgtagatgacgggttgatgggcacagcaaaccaccatggcatgtgtatacctatctaacaaacctgcacgttctgcacatgtaccccagaacttaaagtatattaaaaaaaaagaaaagaaacatttttttcaaagacacacacacacacacacacacacacacacacacacacacaaagtgaaggagaaaagtgctgacctgcagccaccctcagtgggagctgacttctgcaccaactccctctctcactcagtggccctagcccagtgccaaacaggactgtgggctgggagaatccccctgggattctgcctccctgcagactaaggcacctggggagatatgaggctggactgaatctgtcccattttgatgttccttaccctacacgaggctttggggtgaaggggatagggagagtgggtcccgtcacacattcccccagctggctgcccactgtgcttcttacctgcggccaccctgcgtgcctcggtgaacactgtctggtgcaaaggaggtatacgaaatgtgtttgttgaattgatccaagccattatcagcacttcagtgggctgggaggacatgaaaatagctgcatggtgaagtggtgtttgctggtgcctgtcctgtcccctgcctctgccagctctctcatgacattccttaggcaacctggcccgtttgcaggaagctgacagcaggtattcagaaattttaggatttgggcttaatttcagataagcaggacaacctgggctctcccacaatgaaaaatagattctgctgtttttttcctgcctttttaacatttcaagccaagttcctatgcccatccacccatataaaacttccttgttcagaaagtcatctgcgcaactggcaaaggcaccagctcagagttttctatttttattcctgtgtgtaatcaatgggaacacactgtgacggaaataaagaattatgaattgataagagcaaaccattgatatttgcttttgttcctgggcaagctagtgaaggaacatgtacctaatgtatagaaatacaatggtcattttatgcttctgtctttttacagaagcactcagcaatttctgtgtctatttttagggaggaaaaagaaacacttttaagattcaaattgggtaagcttgggaaaagtttccacacaggctgattttctagaaatattgaaatataagacattatcagccctttctcttctaaattattaacctgtgacttcaatacctattctctgtcatcctcttacaataaaaaataattgattctccaactcagtaacactattgataatttttttaaaatctcatttcaaaaattgtactctaacataaactgttttttttttttttttcgtttttttgagatggagtctcgctctgtcacccaggctggagtgcagtggcaccatctcggctcactgcaacctccacctcccgggttcaagcgattctcctgcctcagcctcctgagtagctgagactacaggtgcctgtcaccatgcccggctaattttctgtatttgtagtagagacggggtttcactgtgttagccaggatggtctcgatctcctgtcctcgtgatccacctgccttggcctcccaaagtgctgggattacaggcgtgagccaccgcgcccggcccaaactgtttttattttcctcagtcatcctgccccatacaaagatactctctttacatagtagaatcgcagcatatagttttatattctgttatttcacttacgtatatgatatgacttcaaaataaaatggcatgtgagtctcatgaccttatagtcatgttgacaatactctatcacatatgtatttacataaatatagattaaaattttattttaaaaggatctgtgtgcatttttattgtatgtacatgtcatctcaatgttaaaaccattcagaattttaaaagttacctctttcacactgtcaggcttctcaactaagatagagaaaagacttgtttagagcctaaagctgagcaaaagtgagatacctggaagagtgagtcataggggcagaaagcagaatgacagtttccaggggctgcggggagggaggaatgcagagttgttgtttaacaggagagttgtggggatagatgatgattcacagcaacgtgaacgtatctaatgccactgatctgtatgcttaaaaatggttaaaatgaatcccagcactttgggaggccaaggcgggcagatcacgaggtcaggagatcaagaccatcctggctaacacggtgaaaccctgtctctactaaaaatacaaaaaattagccaagcgtggtctcagattctcgggaggttgaggcaggagaatggtgtgaacccggaaggcagagcttgcagtgagccgagattgtgccactgcactccagcctgggcgacagagcaagactctgtctcaaaaaaaaaaaaataataatgataataataataataatagttaaaatggtaaactttatgttatctatattttgccacaataaaaagaagttttaaaaaactaaatcaagatcattagaaaataatgtttgcttcttcagtcattttgaaatgtgaaaaaatgtgaataagaaatatattaatgttaaaaacttcttgagtttagaatagtaggttcagaaacaagtgaataaaggaatttcaccttaaaagtaaataaaaattaaactaaacagatgtggttcatagacctatgggaaatgaagtctttgaaattctgggaggcccagaattggtaattagttaactagttcaaagtctcatgcgtagtgaatgacagagacttgtgaaaacctaggcaatgtctactagacagtataaaatgattcaagttttcaacctcttgagaatttgaatttttaaatgttatattgtatttgaatttgcttttaaattcattaaatatgtattgtcttcaattttttaaaaatagtgtttctggttataaaagtacatatgtcctttgtagacaattttaaaataaagtataaattaaaaaccatctctggccgggcacagtggcgcacacctataatcccagtactttgggaggccaaggctggcggatcatgaggtcaagagattaagaccatcctggccaacatggtgaaaccctgtctctaccaaaaatacaaaaattagctgggcgtggtggcgcatgcctgtagtcccagctactagggaggctgaggcaggagaattgcttgaacccgggaggtggaggttgcagtgagccaagatcgcatcactgtactccagcctgggcgacagagcgggggaaaaaaacaaaaaaacacccctattcccattcctaatagataaaatttgttaatattttggtgtatctccttctaaggctatttctttttttattttcgtttttatttcttgtagagataggttctcactatatcgcccaggctggtctcaaactccttggcctcaagcagtcattctacctcagcttcccaaagtgttgggattataggcgtgagccaccacaccctgccaagcctatttcttatgcatataattaaaattattgtacataaaattttgtctcttcttttctttgcttaatattatattgtatcatatctctttaagttattaaaggttcttcataaatatataattttttttgagacagagtctcactctgttgcccagactggagtgcaatggcccatcttggctcactgcaacctctgcctcctgggttcgagtggttctcctacctcagcctcccaagtagctgagatgacaggtgtgtgccaccacgccctgctgatttttgaatttttagtagagacagggtttcaccaggttggccaggctagtcttgaactcctgacctcaggtgatccaccagcctcgagctcccaaagtgctgggattacaggcgtgagccactgtgcctggcctcataaatataattttaaatgccttcagagtattctctcttatagctacatcacaatttgcttaatatccatctctttattattggatattgtaggagctcagaacacgataccctaatggatggcactttggcatgctgagtgttttgagctgaaggagactggaagagcctcagaaacagcaagctccctctgaccttctccctccctcctttctctttctcccatttctccacagaagcaggtgatagaaaatggaattattcttccttaaggaagatagtagaaactagaacttcttacccctaaagcaagccagaaaacctagaaattaacctctgagcatctcccttctcccctgaagaccctcatgtgacaggcatcctgccctgtacctggagaaaagagtactacttttgtatttttagacataatgctattgcacccttgatagactacagtatggtgcaaacacaacttttccccctcctctactgtgaagggaacataacttttatatgcactgagaaaccaaaaaaatttgtgtgactcaccttgtcgtgatatttgctttatttcggcggtctggaactgaaactgcaatatctgcgaggtttatctgtacacgttttgcccctatgacatttaggccatttacaatttttgttataaataatgtggtgatctgcttctttgtgtataaagcctttgtctacctttcaaattattatttaatgacagttctagaagtagaattactatgtaaagattacaaatatttttacaacttttggtttatgttgctaaattgcttttttttttcagaagggcattacaaatctacactttcttttcttttcttttttttttttttttttttttgagtcagggtcttactctgtcacccaggctggagtgcagtggtgccatcatgactcactgcagcctcaacctcctgggctcaggagatactcccacctcagcctcccaagtagctggaaccacaggtacacagcaccacaccgggctaattttttgtgtgttttttgtagagactgggttttgccatgttgcccaggctggtctccaactcctgggcccaagcagttctcctgcctaggcctcccaaagtgctgggactacgggcatgagccaccgtgcccagcccacaaatttctatttctactttcaacagaaatatattacaccactgagtaagaataataagacctaatattcacgaggcatttatttgttaaccaagtactagttactatatatgtaacagctcatctttaaaatcttgtatactgttggtgaaaaagttgtctgttgttttaattttatttattgattaatagtgatatttagctatatttaaattttaagttatttgtaagtatttgtagttgtaagctatttttctattatgaattaccatccttattgttttacatgagctgtttatatattgctgtattaaccctctgtcaggtctgctttagctattttttgagttgtttttattgttttggttttttattgatacacattacatatttattaagtatatgtaatattttgtggttttttaaattttattttattaaaaagtttttggttttgagacaaagtctcactctgttgcccagactgtggcacagtggcatgatcacagctcattgcagcctcaacctcctgggctcaagtgatcctcccacctcagcctcccaagtagatggaccacaggcatgtgccaccatgcctggctaatttgtttttattttttgtagaaatgtctattcatctcctttgcccacttttcagtgggattacttgagttgtttgagttccttgtataatctggatataattcccttgtgggatgaatagtttgcaaacattttctcctattaaacaggttgtctcttcacttcgttgattgtttcctttgctgtgcagaagttttttagtttaatatagtcctatttgcttatttttgtgggggtttttttctgtgcttttgaggtcttagccataaactcttgccctacacctgtgtcctaaagtgttttccctatgttttcttccagtagcttttagttgtaggtcttatatttatgtctttgctccatcttgagtttatttttgcatatggtgatggacagggttccaatttcatttttctgtagaagcatatccaattttctaagcaccaattattgaagagggtgtccttttctcaatgtctgttattggcacctttgtagacaatcagttggctggaaataagtggatttacttccggattctgtgttctgtggtctatgtgtctgtttttataccaataccaccctactttgattgctatgctataaccttgtaatatattttgaagtcaggtagtgtgatgcctcttgctttgttctttttactcaggattgctttggctcttcaagctcttttttgattctacatgaattttaggattttttcccctatttctgtaaaaaatgacattggtcttttcataggagttgcattgaatctgattattgctttgggtagtttggtcattttaagagcgttaattcttctgatctatgaacaaaatatgtcttttcatttgtttgtgtcctcttcaatttctttcatcagcattttgtagtttcccttatagaagtctttcacttccttggttaaatttattcttagtcatttctcttttgtagctactgtaaatgggattaccttcttgatttctttctcagctagttcattattggtgtatagaaatgctactgatttttgtacattgattttgtatcctgcaaatttaatgaattcatttatcagttctaaaagtttttgggtgcaccctttaggtttttctagatataagatcatgtcatctgcaaaggggaacaatttgacttcctcttttccaatctggatgccttttatttcttcctcttgcctgattgctctggctaggactttcaatcctgtgttgaataggagtggtgcaagtgggcatccttgtcttgttccagttcttaggggaaaggctttcatcttttccccattcagtatgatgttagctgtgggtttgtcctatatggcctttagtatgttgaggtatgttccttctatgcctagtttgttgggaattcttaccatgaaggtatgttgaattttatcaaatgctttttctgggtcaattgagatgatcatatagtttttgtccttcattctgttgatgtaatgtatcacatttattgattggcgtatgttgaaccatccttacatccctgagataaatctctcttaataatggtgtattacctttttgatgtgctgttggattcagtttgctagtatttcattgaggatttttgcatctgtgttcatcggggataatgaccttagttttctttttttgttgtttggtccttgtcttagtttggtataaggataatgctggcctcatagaatgagttaggaagaattctctcctcttcacttttttggaatagtttgagaagaattggtgttagttctttgtaagtttggtagaattcagcagtgaagccatctggtcctggacttttctttgttgagagactttttattactgatttaatttcattactcattattggtctgttcaggtttccatatttttcttattcaatcttggtaggctgtatgtgtccaataatttgttcatttcctctaggttttccagtttgttagtgtatagttgttcataacagtctctgatgattttttgtatttctgtggcatcagttacaatgtctcctttttcatttctgattttttttttttttttgaaacaaggtctcactctgttgcccaggctggagtgccgtggtgcaatctcagctcactgcaatatccacctcctagattcaagcaattctcctgcctcagcctcctgagtagctgggattacaggcacgtgccaccatatccagctaattttggtatttttagtagaaatggggtttcaccatgttggtccacctgcctgggccttccaaagtgctgggattacaggcatgagcctctgtgcccggcccatttctgattttatttatttgtgtcttctctcctttttcttggttagtctagctagcgatttatcaattttgcttactttttcaaaaagacaacttttcatttcattgatcctttgtattgttttttaagtctgtatttcatttaattctgctctgatctttattattaattttattctactaatttggggtttggattgttcttgcttttttttttcctttgagtcagggtcttgctctgttgcccaggctggagtacaatggctctatgatggcttattccagccttgaccctctgggctcaagtgaacctcccactttagcatcctaagtggctgggaccacaattgtgcaccactgtgtctggctaaacttttttaatgttttgtagagacagggtctccctatgttgcctaagtatgttgcctaagctggtctcaaactcctgggctcaagccatcctcctgattcagcctcccaaagtgctgggactacaggagtgagccaccatgcctggcccgttcttgcttttccagttccttgaaggcatctttagatcatttatttgaaatcttcctacttttttgatgtaggtgtttattgatataaactcccctcttagcactgcttttgctgtatcccataggttttcgtacgttctatgtcaatttccatttgtttcaataaattttttttaaattttctttaagatattttacgtttcttctatgttgtggaatctattgagttttactttatgattcatccttgctttttaaaacatttaattttatttaatggttcagtaataataaagatacccttttacatgtttacagtacctcattgtttacatacactatttcaagcttttggaatagggacaactaaaacagattcttgtgtaaatgagtttctttatataacttcacattctttatgtaatggttcttttgaagcttaacaagttctttctcaacaactgtatttttttaatgtggaattgactaagtatatgaaaatatgaaataaacaaaataaaatggaaaactatgaggtccttagaagtcacattacatccctatatttggtgacatttaaagagatgaatgacatcattgagaagtaaggagaaatacagtgcagcaaatcaagaacatgccactcatgtaagagtgaacatctatctccaggcatgagaaaggtctagagagttcttaacaaaatgctgtcagtgtttatttctcagtcttgagacgtcagatgatttttatgatcttctttgtgcttttctaatttgtttaatattttacagtaagcatgtatcatttttactaaaatatccacgttattgtttaaaacaggaacaaaatttttctacatgcacaaggataatagtatttgtctatatttttttctggtcttttaattaagtgtttatacacacagagagacaggaataaagttttccttagcatttaaataatttccaagaagtatatacattcctacatatgggttaaataaacacacatatgtcaataaacatatattctaacaaactcaggcctgctaaatgcggctaaaagttcccagtgaaaagaactcttaggtgagctatattttctaatctgcagaccctcctactgcataactctggatgatgtcatacaaacctcttcctgcatctgggactctttccagctgctacatgtgggagcttcccgtttttgttctaattgagtgatgtttactggaaatggagtctgctaataagatctcagttcagatagctttgtggggacaggaagaatgattgtgagatgaatttggccaaaaacctttactttctcccttgtcattatcttgttttgataggttggcttagttttgttttgaaattacctcttctgagaaaccaaagaggaacgatatgcgctgtcttcttcttcctcctcctcctcctccttttcctcttcctaccaagactcccaactcagactgtttttcagtctgtccctccatacatacctgcacactcacacatctactagagagtatatggagacagccaagagcccttagaaagatagctgggtaatgtactactctgttctcttgaatttggatggaacttatgacaacacttagatgtgaacaaataaggcaagagaatttgtcccagattgcacagctggttatggcagaacaaagcggtggtgaacctagatttcatatctcctagctcagggcctctggattaaaacccataaacattgttcacatttttttggaactatgcataagggcaacttagagagttccaggtaagagaatgcagcataacaagagttgattgttttaagttgtgttatgttaaagatcagctaagtaaaattaaagagaaaagctgctaaatatactgaattatttcatttttgtggatctccttgattgtgatttgcgagctcagaagtattaacagtttttctcaaaaattttaagatgaaaaattctcaagtccaattaattgaaaagcttaagactactctataccatgcttcactttagaaagtagggagcttgttgcaaattcaaacaaggatgtggtgtcacaactcatgaaaggaatctcttatcaaatatctatcctaccatcaaattgccattacatctgcccgaatgtacatgggacacagttgcgtcagaaaggctaaagctccaaataagttcacattattctgaaactatcagattatgtgatggatataatttgggtgttacagtctttgtagtaaagtttgaggaatgacaccaggtatggtcgagtgcagtggctcatgcctataagatgagcctaggcaacatggtgagatcccatctctacaaaaaatacaaaaattatccaggcatggtggggtggtgtgcacctgtagtcccagctactcaggaggttccagtgggaggattacttgaaaccaggaggttgagactgtagtgagccatgtttgtgccactgtactccagcctgggcaacagagcaagactgtctcaaaaaaaaaaaaaaaagaaagaaagagaaaaaaaaaccccatcaggtaaaatgtagggccactgtcaatgggggacatagagaaaacagagatcttcaattctcttctgcttctaactttcgggacaaggacattttttctccacatgttatcagtaaggtgaggagaaatagagaaagagcataaactttggtaagcgaagatagaagcccaagatggaataatagagtgagaaagagcccaaagctgctccaagtgatttcaagtccccagttttgaagaatgatgtctttgggtcttgagaaaacattgttgtgggatcaccaacaatcgtcagggatatttggggcatcatagagaataggagagattccagaagactggtaacagtggagtattctgattttcagaaagagaaagcagagccagaaaaaaatgtagataatggtctgtaacctcaatctcaggccagagtctagaaggggggattattagaggaacagtttcaggcactagataaaaaaggaatgattaagatccagatgagttcactaaaaacaagtcagggctaatttatctcttggctttgacagagttaccagcccagtacctcagggaatgcccatacatatagaatattttgttatcagttagacatttaataaagtttttttttcatgatattcttttggacaagacagagagatataaactgaattgtggcacactgaatgaattagaaaccagtcaattgtacgcacaggtgctggctaacaaactgtaaagaagcatgcagtggtgagtcccaggctgtgtctgtccttcactgtctcctcataaatgctttcagaataaatatacagaaggtgtgctcatcagatttataggcaacatgaagttagagggtatgatgaatacttgaatggcagaacgaaaattcctaggttgaatctaaaaggatgaaatttaagggtgattaatatgaggtctaaggaattaaatctatcagtgagaataagcaatacttgctttaacggtaactaagagccttaactcaatatgagtcagaagtgtaacgtggttgccaaaaaaactaagattttaggctgtatccagtggtgtggtaaatatttaacaactggccctgggttgggggcggagagagggagggaccttgatttatagctctgaccaatctctgtagtgtaaatactctcaccttggccagtttcaaggtactgactttgtggcactgaactcagaggttggaagagatgtgtgatagcatgccattatgtggtatttccaccacacagatgcagtagatgtgattaacctcaagaggagagataataattaaacacagtaaaattactaggaagtagtattttaattacttattacctttgtttttaatatatctaattgtaggcttatgtaatttaactttaatttttaaaattattattattattttcgagacagggtcttgttttgttttgttttgttttgtttttgagacagagtctggctctgtcgcccaggctggagtgcaatggcgtgatctcttctcactgcaacctctgcctcctgggttcaagcaattctcctacctcagcctcccaagtagctgggactacaggcacgtgccaccacacccagctaatttttgtatttttagtagagatggggttccaccattttggccaggatggtttcaaactcttgacctcgtgatctgcccaaagtgctggaattacaggcgtgagccaccgcacctggcctgagacagggtcttgctctgttacccaggctggagtacggtggcgtgatctcagctcactgcagcctcaatctcccaggctcaagcgctcctcccacctcagcctcttggatagctgagaccacagacgtgccccaccatgcttggctaatacttttttaaattttttgtagaaacggggtctcactatactgcccagactggtttgaactcctgggctcaagcaatcctctggacttggcctcccagagggctgggattacagacgttaaccaccttgcccagcataatttaacttttaattagaactgcattttacaactagctcagaaaattcttgaacatttaactatcagctcttgcaagtttgtgcacatgggctctggaccatggtaaccagaaatgcagtcactggtagaagggaggtgataaccctgctgttctctgcatttgtcaggacacacccagatccctttattccagaacacataacttaaagtcacactttcctgagatcagagcagaggatggcagagaaccaaagtcacgagtgtgtgaaacaacggagaggagcggcgctgtgcagcctggagctcaagacacttgcatgagcggtgagatgagagggacaggggagagcttgttttcaaatatttgagaggctgttgtgtaaggaaggattagggctctaattggtgggtagaaaaggatacaaggagacagatttctgttcagtataaggaagacatttctggctaggcatggtggctcatgcctgtaatcccagcactttgggaggccaacgtgggcagatcgcttgagctcaggagttcgagaccagcctgggcaacatggtgagacccgtctctactaaaaacaaataaaaataattagctgggaatagtggcacacacctgtggtcccagctagtcaggaggctgagacaagagaatcacttgaacctgggaggcagagattgaagggaactgggatcactccactgcacttcagcctaggcaacagagcaagaccctgtctcaaaaaaaaaaaaagatatttttgggaaggagagaaaaaagaaagaaatttcttacaggcaaagctatctaaagaggaatgggctgaaggcaatcctgcagaatatgggcaatgacctttagggatggtgtagagatggttcacgcatcaaaagaggggatggggctggataatcttgaagacgtcccccaagtctctgactacctgatttttgatccattgtgctttctagttgcctcagcctcccaaagtgctgggattacaggcgtgggctgccgcgcccagcttacaactatcaattttatatctaatcttacatcatctatcctcccatctacctaccatccattcctccagattcttgtggaacaaatgcctgaacatatcattgagtccataaacacgtcagtatgcatctctaaaacataagagcattttgaaaatatacccacaatacttttatcacacttaagaaattaatattgattctctaatatcatctaatatccagtcattatttaaattttcccatttgtgtcataaactttttatttgagcttgctcaagtcaggatgtagggtccacacatcgccatggttagatgggtttcttaaacctcttttaggctgtaagtttccctttcattatttatttgttgaaggtgccgtgttatttgtcatatagaatttcccagtctgaatttttaaaaattgcattatggcatatttaacaagtttctctttcccctatattttctgtgataacgtttatgtttgattctttgggaaggaatgctttgttggtggtgtcctgtatttctcactaggagaatagtggaattttgattttgttttatagggattgcttttcaattcaactaggagaatagtgagaaatacagtgagaaattgtgacgtcagcagccactgatgataagcgtctagatctgttaattcatttgcagttctaaacggtgatcttctaattttctcattgctcctttaattattagctggaatacttttataaagagaaatatccccttttcaatgatatggttacgctgaagtacagaaaatgtaagataaatgcttcattacctgtgaaattcaaagcaatgagttggctcccaagcatctgcctaggaagaacaatgagctgttttgtttctttttaagcattatgatgaactaatggatttaaaaatatttgatgtgttttaatcaattgctattgttatttttattaatattcaacttggcttccaagtctttttaacatgatctgacttatttccttgatttctaatatgacaagatctcttacattccacattcaactcatgtattttctgccccagatcaggaattggccatttctccaaagagtcctggttcctttcaatgggaaatgaaatttagagaccaaactctgggctccagtgttgtcagcctactaggttgatcatagtttctggggctttttagtagaaagaattaggaagttctccttcctttcttcttcctcctctcctttctcttcttcctcttcgaaaatatattgtggttcatacgacattttcttttcttttcctttttttttggagacagagtttcactttgtcactcaggctggagtaaagtggcatgatcatagtccaccgcagccttgaactgggttcaagtgatcctcctgcctcagcctcctgagtagctgggattataggcacataccaccatatcttactaatttttttatttttatagagagagggtcttactattttgcccaggctggtctcaaatttctggcctcaagtgatcctcctgccttgacctcccaaagtgctgggattacagacatgagccaccatgaccagcccatatgacatttcaaacaagactacgagatgttttttcaacctcgtcaatctcacatttatactttttttcccttattgaaaatcccaattctcaaagacatcaataaaattacttatttgctttatttcacaaaaaaaatgcaactgtcttacaataactgttctaagacccaccaccaaccatatgactattgaaatacatttaaggtcgttatgtagttctttttggttttatggcgtatcataataatgaaaatcaaattaaagtcacttgaagtagttccttcctgtgtggttattccgccaactcagagtgtacatttcagttcatttgtttcattttggttttgtttcatagggattgcttttcaattaaaaatattttataattatgtaaaatgattacaaatttctaaagtcaaatctacaacagcaggcatattcagaggagtgtgacttctatcccagtccctctaccctatctacttcccaacaaagtcttttttaagaaataaagttttatggcatattctctcattaaaaaaataaggaaacattttcatatatcaaattctctctttttagataaacagtagcatactatagacaattttttctaccttgttttgttttcactagccataaagtctaaggatcactccatatattcctcgttcttttttacagctgtgtagtactctgccatgtgaactgtgcatagtattatttggatgttaaacacatttaatcaaaattaaaatttaaggaaattttagcatggtcagctgaaatagaattcaggtgtctctcaaaatttgtcctcccacctatttatttgttttatttttgtttatttatttatttatttgagacagagtctcactctgttgcccaggctggagtgcagttgtgctatctcgactcactgcagcctccacctcctgggatcaagtgattctcctgcctcagcctcccaagtagctgggattacaggcacgcaccaccatccctggctaatttttgtatttttagtagagacggtgtttcaccatgttgaccagactggtcttgaactcctgacctcaagtgatccacccacctcagcctcccaaagtgctgggattacaggcatgagccactgcgcccggcccagtcttttcatctacttagtggctccaccctgtttttgcagttcctacacacttacccctgggataccctctccagcctgagcaaaggttctacatttttcaaatgattttcagacatctaagattagccctttattggtccaaccccttgaaaccttattcctttttaggtgacaatgcatgctgaggagttcatttaaaggtaatttctgcaaaacctttacccatcacatgccatctctcctgagtaacaagaggccttgatctcaaactccacatatgccagggcatcaccggttgctctattaagcaccatgtttcagtgccttagtactgtttgtaaaacaaagcaactaataatcagaatttatcctgggatcttattgggaagaaacatcctgaaataaccaagaaataacaataatggtaaatcatatgtataaatgaattctagagatgaaggctgtggcaacagtctttctttccttttaatattccttatgtgggtagcagaaatatcaagtttgcaaatactctgcctgggagaaccgccacttgtacctttctctttctggtacagtctttttttttttttctttttttaaacggagcctctctttgtcatccaggctggagtgcagtggtgctatctcggctcactgcaacctctgcctcccaggttcaagtgattctcctgcctcagcctctcaagtaactgagattacaggcgcccacttccatgcccagctaatttttgtatttttagtagagacggggtttcaccatgttggcctcgaactcctgacctcaagtaatccacccgccttgacctcccaaagtgctgggattacagggatgagccactgctcctagcccctggtacagtctttacactgaaaaacggatgcacctaccacagtataaagatgggagtttactttggagacagaagacaggaatgaactgcatcaaaatgataggctcagagttaaaaatatgagaaccgtcagtgatttcacacacacacacacatgcacacacacacacacacacacacacagacgcatgcacatatgcatgcctatagcttatttctttagaaactagccacagaacccattgaaacccagagagctgtggaacacaattagaaaaggcctgggacaggagggctggagtgagccttctgagcagcccagacctcacattagcaggacagaagttagcagcgtagaagcagctggcaggactagagctgcctagccattatagctgggtttcctggcatctgtcttgaagggaagggggattggttactattcagtaacttcaggttttttgttttttgtgtgtttgtttgttttgagactgagtctcactctgtcacccaggctggagtgcagtggcgtgatcttggctcactacaacctccgcctcccgggttcaaacgattctcccgcctcagcctcccaagtagctgggattacaggcacttgccatcatacctggctaatttttgtatttttgtagagacagggtttcaccatgttgtccaggctggtcttgaactcctgacctcaggtgatccacccacctcggcctcccaaagtgctgggattacaggcgtgagccaccgcgcccagacaactcttcatttttttaaagaaaatttcagaagattgcctcaggtgaaaccacagtaaggagatctaacatatggcattataaaatatgaatttgggcatgatgatatgcattatgcaatttaccatgacatttataaagtcaagggatttaggcctagaagtgtccatgaaagattcaatgctttaggtcttcatttatttgtttgtgctgtgcacttggtttggaattccctttccctgtatcatttcatcctaatgaacgcctacttattttttaagactcaatgctattacctcctctatagttccataacagtatatatatttcctgtaacaatattatgttgtattataattgtttgcatattgcctgttttctactaggctgtcagttcttttgggagaggagcccagtcttcatacctcagtgactaacttaaaagacacttgatgtttattaagtgatgtcagagaccaactaatccagttcctctaagtagatgaaactgaggcccaaaggatttccataaattcagtaattccacaagtatatactgagtatttacaatgtgcctagcgctaggtaaggctaaatgtctttagtgtattttaaatatcatttggagtatgcttaatttccatttgtccagagatcaaaagataaatgccagcatctcatgaatcctcaaagcaatattgaattatgttcagaattggtttatatcaatttattttattgtactctaagtgtgtatcacccaagaatgcaatctgcatactgctaatgtgtgtgtgtgaggtgggggagggatggtcagagtgttcaatgcccaatataatgcccaatttaggaaacactgggttatattaggttaaatagattcttccctgaactttcaacatgcttgatagtgactagttaaatctccaagaagagcatctaatatgcactgtttcccaaatttatttgcctagtgaacctccccttttttgttgctcctattaatagctgcctgcaatgcagttcggaagaacatagagttggtcggtgcagttctttgaagagtcctcatctgtgtttagtgaggacttcaaagggaaactgtaagctccctggggaggaaagtggatggaaggggagaagggaaggccggagaaggagcagctaaccaggaagacacgggaggtagcaggtcactgtctagggtctaagagagggacaggggccataagcagacaactgaggagcatgtttccatgctaagctcagtgagacatttggggctcaagcagatgggctttggggtcaagagataaggtgtttcacaaggagagccaggagcacttctgcaggaacatgcagcatgtcttcaggcctctggggattccagaggacatggcaccctgcctgcaggtccccaaggactgccacatgtcagggccacagtgtctgtggggacaggagaggaaggaaatgaagcaggcacaaagtaggttactgagtggtttcatcaacatctgtgacacccactcccagggggttcctggacatatttggggttaggtttaacaaggggcagtagctatggggaacaatatttgcagggcccaatgcaaaatgacaacacaggccccttgtttagagttaagaatttcatgattgtgacagctgagcattaaaccaagcaccaggcccttctgaatgcagacctctggacaactgtacaggttgcacacccatgaagctgccagagagttctcagtggtcctaaagcccacttgaatctcctggctactgtggcctggagaaaccaggttacgcatggtttatataaaaagttggtctccctattccaacgtatctgattatcatggaaacactgtttaccagttgctatggtctgaatgtttgtgtctcccctcaacccctgcaacattcatatttaatccccaatgcagtagtattaagaagtggtgccttaggaagtgatgaggtcctaaagtgaatggggtgaatgggattactgccctgtgagagagaaccaagggcgcttgtttgccccttccacaatgtgagaacgcagcaggaagatatcctgtgaagcagaaagtaagccctcaccagataccacatccgttggtgccttgactttgatccagaacagtaaacaatacatttcttttttttttttaattatactttaagttttagggtacatgtgcacatcgtgcaggtttgttacatatgtatacctgtgccatgttggtgtgctgaacccattaactcgtcatttagcattaggtatatctcctaatgctatccctcccccctcccccctccccccaccccacaacagtccccggtgtgtgatgttccccttcctgtgtccatgtgttctcattgttcaattcccacctatgagtgagaacatgtggtgtttggttttttgtccttgcgatagtttgctgagaatgatggtttccagcatcataacaatacatttctatggtttataaaatacccagtctatggcagctcagatggactaagacaccagtcattctgggtaaactttgttgtaagataaatttatttatttattgttaaattttaaatattttcagagagggggtcttgctatgttgcccaggctggtctcaaactgctgggttcaagtgatccacctgccttggcctcccaaagtgctgggattacaggcgtaagccaccatgcccaggctgttataagataaatttaaccagcctaggcaacatggcgaaacctcgtctctacaaaaagtacaaaaattagccggcatggtggtgcatgcctgcagccccagctactcaggaggctgagaggtgggagtatcacttgagcccaggaggtcgaggttgcagaaagccatgattgcgccactgcactccagcttgggtgacagagcaagactctgtctcaaaaaagaaaaaaaaaaagtacacattaaattccaggaacatatttaatgcagaaatccaggcacattcaagctatttccatatatagtactcacaccataaacagcatccattctcctcacgctgagaatcaaggcagatttgcagctgcattgcagacgagtataacctttgactttgtcctggggttcataccagtattcatttggtgctgaggcagcactcagcacccgtgctgatttccctcaaaaatgaaaaacaaactcaggtggaaaatctgggcatgcaatgtcatttgctatttttggagatgagggagaaaaaagaagttgtggaaagtgttgtaataagcagcatagaacagcagcccatgagtgtgaaataaaacaacacccgcatgctcttcttgacagtgattgaatggaagcaacgaagtggaggagaaaccacgctggggagagctggcatccccttgggagaagcctttccaacagtggactgaaagcatgagttaccttaccctgtaagattaatctccaaccaaacagcaatcttacctctgagatacaggcatacctcagagtttatgtgggtttcaatcccaaccactgcaataaagcaaatatttggaataagtgagtcacacagattttttggttcccagtgcatagaaaggttatgtttatactatactgcagtctatgaagtgtgcaatagcattacgtcttaaaaaagtatataccttaatttaaaaatacttttttgctaaaaaaaaatgttaacagtcatctgagcctttagtgagttgaaatctttttgctagtggaggatctcatctcaacactggtgactgctgactgatcagggtggtggttgctgaaggttgggtggctgtggcaatttcttaaaataatacaatgaaatttgccgcatttattgactcttcctctcacaaaagatttctctgtattgtgagatgctgtttgatagcattttgcccacaggagaactcctttcaaaattggattccatcctctcaaacccttagttgatgctttatcaactaagtttatggaacattctcaatcgtttcttgtcatttcaacactgctcacagcaccttcaccagaagcagcttccatctcaagaaatcactttctttgctcatccacagaaagcaatttctcatctgttcaagtttaatcatgagattgcagcaattcagtcacatctccaggtaccacttctaattccagttctcttgctattttcaccacatctgcagtgacttgctccattgaagtctcagaccccacagtcatccacgagagttaaaatcagcttcctccaaactctgttgatgttgatagtttgcccttctctcatgaatcatgagtatttataataacatctaaaatggtgaatcctttccagaaggttttcaatttactttgcccagatccatcagaggaatcactatctatggcagctacagccttacaaatgtatttcttaaataacaagacttgaaagtcaaaaatcactccttgatccatgggctacagaatggatgttgtgttagcaggcatgaaaacaacattcagctccttgtacatctccatcagagttcttgggtgactaggtgcattgtcaagaagcagtaatatattaaaaaggaatcttttttattttttgagtagtaagtctcaacagcaggcttaaattattcagtaaaccatgctataaacagatgtgctgtcatccaggctttgttgctccatttatacagcactggcagagtagatttagcataatacttaagggtcctaggatttccagaatggtaaatgagcaccatgttcaacttaaagtcaccagctgcattagtccctaacaagagagtcgcctgtcctttgaagctaggcattgacttctctctagctacgaaagtcctagatggcatcttcttctagtagaaggctgtttcatctccatcgaaaatctattgttcagtgtagccaccttcatctatgatcttagctagatcttctggataacttgctgcagcttctccatcagcacttgcctcttcaccttgcacttttatgttatagagatggcttcttgccttaaatctcatgaagcaacctctgctagcctcagacttttgttctgcagcttccttacgtctcccagccttcgcaggattgaaaagagtttagtgccttgttctaggctaggctttggatgaagggaatgttgttgctggtttgatcttctatccagctcactgaaactttctccgtatcaatgctgtttcgctttcttatcatacttgtgttcactggagtagcacttttaatttccttcaagaatttttcctttgcattcacaacttggctatctgtttggcacaagaagcctagcttttggcctgtctcagcttttgacacaccttgcttactaagcttaatcatttctagcttcggattcaaaaatgagagatgcacatgattcttcctttcacttgaacactgagaggccatcgtagggttgttaattggcctaatgtcaatattgttgtgtctgagcagtggagcagtcagtatataacatttattaattaagcttgctattctgtatgggcacagtttatggtgccctaaacattaacaatggtaacatcaaagatacctggggccaggtgtggtggctcagggactgggcaaagtggttcattcctataacctgagcactttgaaaggctgagatgggaggatctcttaagcccaggagtttgaggctagcctgggcaacacagtgagaccccatctcaaaaaaaaaaaaaaaaaaagaatactatagattgagtggtttaaaaacaacagaaatttatttctcacagatctggaggccgagaagtccaggatcaaggcactggcagattcagagtctgatgtggcctgctttctggttcatagttgttatcaccttgctctgtcctcacatgactgaaggagcaaggaagctcttctgagtctctctcatacgagcactaatctcattcatgagggttctgctcattcatgaatttcctcccaaaggttccgcctcctaataccatcaccttgaggattgggattttaacctatgaattttgcgggacacaaacattcagtctatagcagatggaagatgaagcccagctttctaggaagcccccacccgcagaaatttatggagctaaaaaactgcccttcaactccctccatttccttggctggcctcttcccccgacatctccctgttgtttctccacagggagcttttattcattgagaaggccagaacagagtggggacagccatgaggtgcagatagtgggagcctagggcggcagagaaggatgaccagagggcctgggggcaggagtgtcacctatggaaggaatggatcctggggacaagctgcgttgtcggctctgactaggtggggcggggcaggactgtgcgatgggcaagtgtgaactgttactgtctccattatgcagatgaaggaactgagactcgatcatgagggggattcaattctggtccttgtcactctgaggcttgtgtcctttctgcgctaccaagctttgtctctgcttctcaagatggtgatacaactactaattcataaagctctgcaagagggtggtggttttgagttgtaatttcaatgaagagggagaagaagtagaaagaaactaggtttatttttatgctttggaatattgattgaaagaatcaaaaggatataagaggataaggcaggaaaagtggaacaagagctaaacaacaaagcctggaaaatagactatactaatatcttaaaaagctgatggattgaaggaaagattcgggtgaggggggacaactgaagatatgaatcatgggtaaagaggaggatgtgatggtctttgccaagcaccagcactggcagtgggagtgtgtggggtggggtctagcgctcatgttcatgacatagaggaggacctgggcctagagccactcagtaaactggtggcagagccagggtaaactttggtctcctggccccaccttccagggctcttttctctattttgtgcactcagagaagggagttaaaagatcaaagatgtggaaagcacatgtgaaaagttagaggacacccacatagtaagaaacttagggccaggtgtggtggctcatgtctgtaatcccagcactttggagactgaggtgggaggatcacttgagcccaggagttcaagaccagccctggctacatagtgagacctcattctatgagaaaatgagaaataaataagccaggcgtggtggtgtgaacccgtagtctcagctactcaggagactgaggagggaggattccttgagcccaggctgcagtgagctatgatcatgccactgtgttccagcctagatgacagtgagaccctgtcccaaaaaacaaaacaaaacaaaacaaaaaacaagaaacaaacaacaacagaaaaaaaacaaatttaggcttaccacttgaggtggacttgatactcctaaaacctgaggggtaataaaaagatgcaggttgaggtgccaggaacaaagaatccaagactgcagctttgaggctttcaagggaagagggtccatcatgaccaagaaaaaattttcagcacatgctgtgcaggtaccagatgcaaggagtactataaaaagtctgaagatggcgacctccagggaatttagtcgccccagcaggaaggcagccattccaaagacgtcccaatgcagtgtataatagccacaggcagttaagttagtcaggaaagtgagcacccagagagaatggaaggagagagggaaaaactgaagaaatgtgtagaaagacaaaaataagacttaacattacgattttagacaaagcagcatgaggaaatgtaaatttttttaaagaaagtgattagataaaacatccaaatggaaacacatcttgtaaaccgacgaagctcacagactgaatacaaaacatcacatttttattttaaacttaaaaaattaaaaatgtcggatgtggtgaagcatgcttatagtcccagctgcccaggaggctgaggcgggaggatctcttgagcccaggagttggaggctacagtgagctatggcaccactgcactccagcttgggtgacacatcaaggctgtctctaaataaataaatacaaataattacattcaaataaagtaaaaagtccaagcactacaaaaaggtttaaaaagtcttactatcactgccaccatccgtactcttctcactattaacaatgtattcatgactgcagaaaagtatcttacaattatatagaaatgactcataatttatcacatacatacacaacacacacttttagaaatgcgtacacatgggtcgtacagtacacattctgtggcatgctattgccttgattgcatagtcatatatctcagagctcaaaccaccttttcaaaatctctacggagtagcgtgctatatggtattacataattatttagtgaattcaccattgttgggcatttaagctgtttgaagattttgctgttacagctatagaaatgaacatacttggcatatttttttgtgtgtaacctaaggtaaatgtttggcagtggaatcacttggtcaaggggtatgtatgtatttctttctttcttttctgattttgagacagagtcccactctgtcacccaggctggagtgcagtggtgtgatctcagctcactacaacctccgcctcccaggttcaagaaattctcctgcctcagcctcctgagtagctgggattacaggcacccgccaccacatctggctaatttttttgtatttttagtggagacggggtttcaccatgttggccaggctggtctcgaactcctgacctcaagtgatctgcccaactcagcctcccaaattgtggggattacaggagtgagccactgtgcctggcttaattttttttttaactgtggcaaaagacacctaaaaattactatcttaatcattttttcagtgtacaggtgagtggttttaagtacattcatattgttgtgcaaccctcaccaccagccatctccagaactcttttcctcatctcggactgaaactctatacccattcaacatgaactccccattctctccactgccctccgtgtccctcccgctagcaaacaccattctattttctatctgtatgattttgactactctggctaccttgtaaaagcggaatcatttgtctttttgtgactggcttatttcacttagcgtaacgtcctcaaggttcattcatgttacagcatgtatcagaaattccttccttttaaggctgaatagtattatattcactgtatggaggtatgtattttaaatttgcagacagatatgctgaaattgtccttctaaaaggtgataccttcattcccaccacagcaagtaggtccagccacatttcccccaccctcaccaatcctgcttactatccagcctcttcatgctgccagtttactccatggaagaggaatctggttattgttttcctttgcatgcatgagtaaggctggtcaccgtttcacagatttattggcgacttttttttttattgttgcatctgttgatatctttacccattgttttctcttgggctttctttttcttagtaatttgtatgcgttcttaataaattaagaaattagcccttttaatatcttatgttgcaaatacctgttcccagcttatttatctttttactttgtacacagatcttcttgctgtttactttttattttatttatatatatttttgagacagggtatcactctgtcacccaggctggaatgcagtggcgcgatctcagctcactacaacctccacctcctgggttcaagcaattctcctgcctcagcctcctgagcagctgtgattacaggtgtgcgccaccacccatggctcatttttttgtgtttttagtagagataggttttgccatgttggccaggctggtgttgaactcctgacctcaaatgatccgcctgcctcagcctcccaaactgctgggattacaggtgtgagccactgcacctggcctattttttactttttattatgaaaaaatccaaaatatataaatcaaatatatttaaaaagtagagaaaagagtactctgtgtacccattaccaagtttaatctccaccacacctcaaattattttgagagccaggcatggtggctcacacttgtaatcccagcacttgggaggcggaggtgggtgggtcacttgaagccaggagttggagaccagcctgggcaatatagtgagacctcatctctaaaaaaaattaactgagtgtggtggtgtatacctgtggtctcagctactcgggaggctgaggagggagaatcacttgagcccaagagttggaggttaagtgagctatgattgtaccactgtactccagcctgggtgacagagtgagaccctgtctcttaataaaaaattattttgaagcagatcccagacatcatcatttcatccacaggtgttttcaacgtgtatctctaaagacaaaatttttttaaaacgtaactataaaactataatcatatgtatgtggttttaaaatataaaactgttcatttctaagcaaacatcagtcattttctatatgatttctgggttttgtgccatgtttgcaaagtcttcataacagtattataaataaattcgcccatgttttcttctagcatttattttactcaaaaaccattcattaaattcaaaattattgtccagcgcatgcaaagttcttaagttctggaaagacacagagtcacagggtaatcagagccaagagagttaatttccctgccccctttctcacctgtaaaacatctgctgccatgaaaccccttttcagaccctgtcctccttttccctctgtagacaaccttcctgacctcatgtgtgggtcagaaccccctatggactctttcgcctctggcttcctttttttttttctttttaataagagtgttattaaaatataattcacatataaaatgtacccttttaaagtatgcaattcagtgatctcagtatattcacagttgtgcaatctttgccattatctaattttacatttttttcatcacccccaaaagaaaccttccacccattaagtgatcacttcccattttcatgtccccacgagtccccggcaaccactaatctactttgtctctatggattcccaagacatttcataaacatagaatcacaatatgtggccttttgtgtctgacttctttattgctagtacttttagagtctcattttaacattttacatcatactctttctggaatttactttgatgaaagaagaggagttatacagcttgactctttttttctcccagatagtcctgccatagtctcaacactgttttctgaataattcatctttcctctcatggattagaaatgtcaccactatcatctactaaattctcattttagtttatttctggatttcctattttattccattatctatctaaatctctgctagaatcaaactgggttatttttttcacttatttacttattttagtgatggagtcttactacgttgctcaggctggattcaagccatcctcctacctcagcctcccaggtagctaggactacaggtgcgtgccacccccccgcagcttaaatgttttaattcttgtaacttcaaaatgtatttaaatatttaatctaactgcctcccctcccctaatatctttctgttgagattttcttcttggctattctttcttgtttatttctacagatgaccccaatattatcttgtaaaatgttgaaaagaaatttttaaatatttttattgggatcacattgaattgatagattaaatacagcaagaaataataccccttaatagagattttatattttctttatatggtcctgcctatttctagttaagtttattttcagataaattgatcatagtgttcctatttaaatgggatcttttctttcattatattttctaacgagccattttgtacagtaattatacaaaaagtaactaactactttactaaaattctcttataatttctgttagcttttctggcaaaacaaaccacccaatacttagcgtcttaaaataagaaacattatttctcaactctgtgggtcaactggcagtttttctggtctgggccaactcggtttatttctgcagaaaactggcactttaattggcctcgatagacgagagtggcttcactcagatgtctggtagttggttctgtgtcagctggagcaacagggatgaagagtctgtgtgtttctcatcatgccgcgggctaacctaggctcattcacagagcagtggtctcagcctcttaaaatggtaaaagaaggcaagtcttaacacacaaacagttttcaagtttctgcttgcatcatgtttgctaatgtcccattgttctaaagaaagtcacatggttgagctcatagtgtgaagaaatatacttcatttctgagaagagctgcaaaagattgtagctgtttttgcaatctcccccagattcctaacatttctttttggcctatttttgtcaggtttctagttattatttgatatcatttaaattaataaatcctccttacctcaagaggtaattttaactcttaaattattttcttacttaatcatactggttaggatttccaaaacattattaaagtatagtatcttactttaaaaggttactgatgggcctgtaattccaggacttttggaggctgagggaggaggatcactggaggccaggaatttgagaccagcctgggtgacatagagagactgcccactacttctacaaaaataaaaaataaaaaattagccaagcgtggtggtgtgcaactgtggtcccagctacttgagaggctgaggtgggaggatcactgaagcctgagaagtctgggcttcagtgagccaagatcatgcctctgcactccagcctgggtgacagagtgagatgctgtctcaaaaaaagaaagaaaaaaaaagttactaatggttatctaatgggtcgtgggattatagggcttcctttttattattttgcctcttgttagtctctactttttctacaatgaatatgtgctgcttatataatcaaatcattggtttgttggcacaccatcactttgggatggctcagagcgtcccagttcaccctaaagtgtaagctgcagtaaccatcctggttgtaaccagaatctttgttctacaatttggaattggagtctccttataatctaaagattttgtagttgttaacatattaacactttcgattttataatgtattcttacgtgtcttttaagcacatacttctggctgggagtggtggctcatgactgtaatcccagcactttgggaggccaaggcgggtggatcacttgaggtcaggagttcgagaccagcctggccaacatggtgagaccctgtttctattaaaaatacaaaaattagccaggcctggtgccgggcacctgtagtcccagctacttgggaggctgaggcaggacaatcgcttgaatccaggaggtggaggttgcagtgagctaagatcatgccactggactccagcctaggtaacagagcaagactttgtctcaaaaaacaaaacaaaacaaagcacatacttcctcaaagtgctttaaggtacatgttaatttttttaattaaaattttttattaaaaaatatatatatctgtgtagtgtgagaacaaaaaaagaaaaagcataatatcttctttctttaatggaaattaaagtatgatgctgaatttttataatggcaaaaataatctagctatttctaagatactaagactctggtttttgttttgattttggtttgtttgttaaatcaggaatgaatgttcaattttgctaaatggcatttcagtatctagtgtgatgattatactttttcctttgatctgttaatatagtagcacattggtacaattcctttttttttttttttttttttttttttttgaggaatctcactctgtcacccaggctggggtacagtggttcgatctcagctcactgcaacctctgcctcccgggttcaagcgattctcctgcctcagcctcccgagtagctggcatcacaggtgcccaccaccatgcctggctaatttttgtatttttagtagagacgggggtttcgccagtttggccaggctggtctcgaactcctgacttcaggtgatccacctgcctcagcctcccaaagtgctgggattacaggcatgagccaccgcgcccagtcggtacaattcctaataatgggccatgcctgcatttctggaacctcactgggttgaggagtttttttgttattgctggtatagaacaattgtgtctccatacatctgcctattctggacatttcatagaaatggaatcatactatacgtgaccttttgtgtctagcttctttcacttagtgtgttttcaaggttcctctatgctatatcatgtatcagtaaatcattacttgttatggccgaataatttctcattgtatggatagaccacatagaaatgcttttatgtcatctaccaagttaatgttcgtatcatcttcctcctttatttcacatctctagtggattacattgtagatattctggtgttggaaaaccctttcattcctgaaatacacttgacttggttgtgattattattcatttaataaattgctagattcgatttgctagtattgtatgtagaatactggtatctttctatatgtgagcttagcctatattttatatttcttttgctctcctcatttagctctggtatagggttatgctagcacagtaatatttgtataagataggaaatatttcttccttaaatgtctgatagaccctagccatagagtcataggatctgttcccttttggaaagtaggtctcggctagcatttcagtttcttctatagttattggtttatccaatctttctacttcttcctgggtcagtctaatgtgcaagcagtaatgtgtacaaaacagcttgatgagatatcacaaaacaacacccaggtcaagaaatacaaaattgccaatattccaggaatcccactggtgattcctcccaattactgtttattttctttccaaagtaattattaccttaatttcaatgataattatttccttgcttttctttatagttttatctcataaccgtggaaccccaaacacgacagttgttcttcgcatgtatttaaattttaaaaaatttaattttagtttttgtaggtacatagtaggtgtatttatttatggggtacatgagatgttttgatacaggcatgctacgcataacaatcgcatcatataaaatggggtatccatcccctcaaacatttatcctttgtgttacaaacaacccaattatactcttttagttattttaaaatgtacaattaaattattattgactataatcactctgtcatgctatcaaatactaggtcttattcgttctatttttttgtacccattaaccatccccactacccacagccacctccactacccttcccagcctctggtaaccatcctcctactctctatcactgtatttaaattttatgtaaacgaagttacacaatatttattcttatggactggtttgttccactcagcaacatggttttctcctgccatttcctgttttcagtattttgcagcagagtgcccaacatagaacataatcgcaaatattccactgcagaaaagaggtgctagtgcttaagcacaaacgggagacatgattattttgctttaaataaatacttaaacacagctcaggtcctgcaagtatctggactctaggtctgagtagtggagctgagtcccacttgggcccacaatgatatcatgattccccccttcctctcagtgatcaatacgtggcatcgagtgccaatggtcaaacgtgatcgcaatgagctccttttctagagccttccgcaactctctacggacacgactagccaggataaagaccattagaattgttcggtcagtggtccgtaacagttaagtattttaaggctgtccatggcgaaaccctgtctctacaaaaaatacaaaaattagccaggctggtggcatccgcctgtgatcccggctactcgggaggctgaggtgggaggatcacttgagcctgggagaagaaagaaagagagagagagagagagagaagtattcttcatgggtctcttggttttttttatcggggagacagatgcatttaggtgattttcttcagctcatcctgcaggaccagcaggtccctgtttctgaggaccacatgcccttgaagaaagctttgcccctttcctctctgaagatggtcctccaacaatcgagggtgcctgtgtactcgaggtcagcttctttgcctcgactgcatctgcatcccatccacctaggcaggcagatcatttgaggccaggagttcgaaaccagcctggtcaacatggtgaaaccctgtctctactaaaaatacaaaaatcagccaagaagggtcacacgtgcctataatcccagctaccaaacttaaaaaaaaaaacctctactatatcttctgaataataatttgaatattatttctttgtctcttaggtcactcatcagcaaacatatatagtgtgtctgccttaggtaaagtaactgaccaggttcaaagatgcctctgatatgaaccaaatcactgaccctcgcaaaacatgttgctttaagaaattgcctttgtatgagagtaatccctataggagcatcttaagttccttaaattttttcctctcaataaacccagtagtaattgtaccctcctgacagtcttcagagggcaacagaaattacttagagttaagaaattaaagtgagtaaaggatacaaattatttacaggataagactttatgtgcaaaatacatctataaagtttacttcgtcaaagtctgacctgtttgcttagcctctctattcttccctccatttcctctttccattcccacctttcttcttagtgccaatattttcctcaaacaaaggcttttctcattaactgcctgcattgctttgcctccagccctctgagtctgtgttctctttggtcattgttttccatcagcagaagcacagacacgctctcttctaagtattcaaggcatgcctgacttcccaagatgatcttcccaagtcactgaacgtaacatcaagaacttttgcacattttagagtacatacacgggaagccacatcccagaaatctacatggcaacctcgctaggtaactcttaactctgaaacccatttcagaaacactgcctggagttcaagggcagagctggaattatagttcaaagctttggggtggtctgttatgcaattaaccaactcactttgttattaatagtatcacgaatcattatgcaagccaggtgtgcttgtaagggaagcaccaagcactgcttcaaccatttaattatttatgacactttccccctttttaactaaagcatgcttgctgtataaattttgacaaacaataggtaacttaaacaccagccataatcttaccacatagatggtatcacttattatggcagcatgcacttccaggctttttttttttttttttttttttgagacagagttttgctcttgttgcccaggctggagtgcaatggcgtgaactcagctcactgcaacctccaccttccaggttcaagcgattctcctgcctcagcctcccgagtagctgggattacaggcatgtgccaccacgcccggctaattttgtatttttagtagagacagggtttcaccatattggccaggctggtcttgaactcctgaccttgtgatctgcccacttcggcctcccaaagtactgggattacaggtgtgagccaccatgcccggcccacttccaggctttttaaatgcattgctgatattatatgtaattttactttctgcttaaaattatattaaaagtagatttccatgtctgtaaattttttatatcattaaatggctgtaaaatatcaccttgaatcataaagaaatgaagttttccttttattagattgtaacttgtttccaatttcatcacaattgtaagtaacattgatatggaaatccttatgcatgactctgtctgtatttcagattatttccataggcaaaatatatatctgatacaggtcttgcatccagaatatataaataactcttacaaatcaattataaaaagacaaatgagtcaatttttcaatgggtaaaaaaaagtgaacagataatttaccaaagaagatctacttaaggcaaataaccccatgaaaatatactccacattagtcacctgagaaatacaaagtaaaaggacaatgaggtaatactacaaacactacaggctaacattttttaactggcaatacaaagtgttagcaatgatatggagcaactggaattctcatacattgctggtggaaatgaaaatgatacagcccctttggaaaacagtttatccagtgttttgtaaagttaaactacacttactatacaacccggcaactctcctcctagaaataaaatacaattctactcctcagagaagtgaaaatacatccacacaaaaacctgtatatgaatattcagagcacttaattaataatagcccaaactggccaggcgtggttgctcacacctgtaatcccagcactttgggaggctgggatgggtgggtcacttgagatcaggagtttgagacaagcctggtcaacatggtgaaactctgtctctattaaaaatacaaaaatgagctgggcatagtgacacacacctgtaattccagctacttgggaggctgaggcgggagaaccgcttgaacccaggaggcagaggttgcaatgagccgagaaacaacccaaatgtccatctactgatgaatggataaacaaacaattgtgatgtgtctatttaatgcaatatttctcagcagtaaaaatgaataagctaccgatacatgtaacagcatagataaatctcaaaagcagtgtgctaaggacagaaaccaggcatcaaagactacccactgtataaatccatttatatgatattttagaaaaggcaaaactatagtgatatttctagtttcctgggcttgggagtggaggtaagaactttttggaatgaaggaaatgttctacaccttgatcgtggtggtggttgtatgactgtatacatttgtcaagaagaattaaactgaacacttaagatgagtgagtttgtagtatgtacattgtacctcaataaagccaattaagaaaataagaaatggttctgatatatggttttttgggttttgtttgtttgggcagctgacctaaaatagaacctgaaaacagattggggaattcagaaagagaaataggacttgaagggtgtgggggatggtgtcaggacaatgatttctggttttggaagtgttaaggaggttgagttaatgagggcacagagagagaaaagagacatagagaaatatggggcatgatgggggggtctctactgcagcaaaaaggaaaaaggagagcaagaaattgagaaaacagtttttatacataggatttttgtatgtgttgcctattttgtctcaatttatttttatttttttctcttcattctcttggtctctccttttcctggggggtcttagacaccatgtgtaactattgcgtgcttccaaagttttccactaaacagaccacacacatacatacagacacaccacacacaaccaaatgttccccaaccccaccccaccaccaccaccacatacacacaaacacatacccctcacactaaaataaaacaaccaaaggagaaaattggagggtggaagcaaaccaagagacaggaaggtaaaatctggcccctgccttaaagcgcattagttaggagagttcactctcttggtcctttacattccgtggggagaagcagtagaaaattaccgggttattcactccgagtctaagcagctgaataggaaaatagctttaatagccctattaggacctgggccaaggactttttctttgggtttgttgtgaatgattaaaggttaacggtggcatttttctttcagcctaggggagacaaccatctcagtaatgatcctaattggatccaactggggaactccagaaagtttcagtaacaaatttgcaatggttctgggccttttaatatggattcacaaaagataatgaggttatcctgtcatttctaccctatggatgaggaaagtgacattcagacaggccatgggatctacccactccctcgtaaagaactggaggaccaacattagcaacaggacctcccatttggcattttgttttcagatgtgcctagaagaaggagattacagcttcttggactgttgaagcctgggttcttcttgagttgtgaagatatcacctaaatcctatccacattttgtgcaccaggtttgtggacgcctaccaccattcattcattgcagtggctcagagaagatgaaaacaggactctttggggccaatgaagatccccaacagagctcagatgaccagagtggactggcttctaccctaaatacatacaacaatacttcccactctgaccttgctcactttatacaacaccacacaactagagagtggcagagctgctgtgggaacccaaatgccatctgactccaaagccttactctcaaccaccaccctgctgcctcctattctttcctgaaatcttcagtatagtcattattatgaagtaaaaaaaaaaagaaaatgaaaggatggaaggaaggtagagggagcccctctatctccattctttgtttccatgaagaacctctactccattttcaggggagtgctattggtgtaacacactttctggccctctccctcccattcttgtcactcattctccccaaggaagaagcgatatgtggatgataagattggaagaagccactcttatgttcggtggtgtgctggtaaatgtttagcagctggctctggggcagagagaaagccctgaattgtagtatgtgccaatctccatggtgtaaaaacacttctaccatagctgcttccaagtatgtaaattgtacacctcaataaagccaatttaaaaagtaaagtcaatcagtttgtaaaactcttgagactttaacattcagtccagcaagctgttacctgccggatccagcaacacacaacccgtaacataacgagttgggtctcagctccccgctcttcacagactccagagttctctcccctttgtggggttcctcatccatccttccattgcttctgctgctgccctgaaggcatcaccgctctcccgtctcctcttggggcacctaactctcttaacagtttaggactttgaggagttttgcctttcacaaaaagaaagaatgggggaaaaacggttatgcctcagcagctttcgctgtctaccctgcagcacaaattccacttgatggaggaacacaaaggtcggactccctgccgtgaagaggagaaagggaaattcgaatatggaaggagctctactctcccttgctctgtcctccgcaagagaatggggcagaacattctttagtctacacctctgtcccacatgagttgccaaagaccacagtgcctggtgggtgacatctctccaggcttttgaagacatctgagcctggattttgagcacattcctgacctccctactgggaggctcttctccttcaaggtctgccttctgacaagccctagctctttcccacctccagtggctgggtgggccggggggtggggtaagggtggagatgtgggcacattctgggagccccaccagaaccccatggagtggagaagtgaccttctaaggaggggagcgtacagtttccggaagggaggaaggatgcggtgaggaccaaatgcatccatgcaggatttcaaatataaacgactctatagaatacaagcacctactcctggcaaccgaagccgaaggaagcctaagaatataagagacggggcttcggcgagggcacgtgaccgaaaactcacataacactccacctgccccagtccagccagcctgctgtccacagtgtgcccatcagtgtatcaaacctcagtgctttatttcctgggatcctggccgagctcccattaacctcctgtgttgtccccacagctcctatacatgggagagggcctgcgttgggccagatcccagagctggggcctaatttgtgatgggatgccctgggaggcaagcgtgcttcagcatgtacccaatcaatagccagacacccaggtccggaggtgcctgagtcggtcagcaggacgttgggcaggtctaggttcagaacctctgcagtttttcccttggcttccccggggcttgtccacaacgccccctgctgcccattcttggttaaccttgtgtcttgtggatacctcatcagatctgttcatgaagcctaacgcaaggtcctccctccagggtgacacagtgaagtcaagtaacagatgtggagatgctttggagagcttgaaacagaagactacataataacaatgggccagtatcataaagccaagattgaagaagacagaactgaatatctccctcatctgcaaaacttgccttatctttcagtatcatcctgtttcagtggacagaaatcaatccatcatatatttgagccctgctcttataaccaagttaaattttgcctaaaataaggccctgcctcaagcaaatcatggtttgttttttattttattttatttatttattttttgaaatggagtctcgctctgtcacccaggctggagtgcagtggtgcaatctcctctcaccacaacctccccctcctgggttcaagcgattctcacctcagcctcccaagtagctgggattacaggtacgcaccaccatgcctggctactttttgtatttttagtagagacggggtttcaccatattggccaggctggtcttgaactcctggtctcaagtgatcctcccacctcggcctcccaaagtgctgggattacaggcataagccatcacgcctggccaaatcatggtttagaaaagggagatggtcaaatataattgttatgactgccatagtacctactatgtcccagataatttgcctaggtttttaaccctcacaacacatccctaaaacattgtacagatgcaaatgcagaggcacgaagaggcttaaaacattcccaaagtcacatagttactataaagccagtaactggctctatgtctatctgagtccaaaatgtgttttgtccccttctgtgcctatgcacagagggcagtgggaacataaatggaggtggagggaggggtaagaaggagacatcagtggtctaccctctttatgtgataacagactccctcttttatctggcagctgctccctcaagaggaatacccattctttcttcctaggtcaagaaagagagtccaaggcatggtcaatcacaacactgtccctctagtcatgggccaagtgctgggcacacgtcaccagccaggctactcttagcctttcccataattttaataacctgagactgggagaaagaagcctcactctctcctggagtgatcaaactgtatgtaagtctagagttctctgtgagtacagtctcctctagcaagaaaggatgagaccaactcataataagaagccaaaatacatgtacatatgagtaagagagagagagagagctgacagcattgtttgggtgtctggatctagccattcctgtggtggctctgtctagtccttacttaaatgagttaatacatccccttttaactgaagctagtttgtgttgggtttctgtcccttaaagtcaagagtcctgagaaatacaatactggtcaaaaaaagtcttcatagaacaggtgaaccaggaaaaaagggattcaccagaaagataagaggagaggcagagggtgaacgtaacagcagctgcactcgaggaactgcgagcagctcaggatgacttgagctgagatgtgcagagggggttggagagacgggcgagagccacatcagggaaggccttgtttgtcaggttaaaatgtttggtctttatgtgagggcgacagggagcccccaaagggtttcaagcagtggtgtgacatgctcaagctcgttttgagaagatcactcgggagaacgggtctgagagacagcacaacaggagggcagcggattagttatgaggctgctccgggaatccaggtgaagagctcaggatggaaaatgactcgacgtttttgacttggtcattggccagaggggagggcaagaacgaaaagagttgtgttttgttcatgtgcagtttgaagtaagtatcatacatttaaatggaattgtccagtaggtttactaaaagagatgacagagttggcgatgtttaagtttttctgagtcatcaattcagctgtttgctgtctgcctactactggccaagcactgtgtggaggagaacaccgtccagcctctgctccctggcatcacactgtggcaagacaaaacagatgataaccagagaaaccaatcaagaaacaagggaagtgcaggggagaccgtaaagcagcatcgtgtagcagaggggctggggtgggggctccatctcttcagtggtcctggaaggaggagctgacgccctgagggtgcaggaggtggctgaagatgaatattctccaattcatgcccactgaataggaacatgcccatttaaaagcatccatatgcattttgtttggcttgttggttttctttgcctgcctatgccttcaaagctggcattgaggtggcaggaggcttctgtgcagaaaactgaggctggtgctggaaaactcccaccatggcccctttgttctcatccagtgcctttcatcccacactcccaaagcccatcctggcgcccaccctttaattgtcaggcctggctcatcgacacaagcaggtggcatttgatcattattcctgcatcataaatgagggtaacaaaggcctccctctccagggtatcagccaatattattttgtgagttcaagggatctgactttgagttgaagcagaaaggcctgatgtcccatccttttcatttctggaattacccgtcgctgcatctttctgttaccgccatttcctctttaactccacgtatctaactggaaactttgcttttctttgtttcatcttctttggaatatgttgttccctgtgacccctccccacaaagccttgcctctgcagcagatgccctgagccttcctgatgcctgggactggtacctcatccagtttgcttgtttcaggcactaactaaactagaatgtgcctggatccctatgggccttggctttctaccagatgacaggcaaactaagagacgtacacaacctatgcactcccttccctctagaatgtttcagcaggggtcctctaagtaagaaagctggaattaaaaggaatagttttaatggggaaaccctggctagggagatgcttgataccctaaggctgtatgtctagctaggtcaggcatagctcagtgcggtctgcatttcatagcagatgtttagtttggaaagtcccctggctacttggcttctagagccctctctcaccatgggacttctctgtgggaggacagaactcatcaatcacattctccaaatgtcaagttcctgctgtgtaaccccaggagaaccttgcttcccatctacataacagaagtgaggaccccagatttgctagacaaaagcttgaacctgtggggaaaggtccccccagctggtcagaattcccaaagaaggctaccactgggagatggattgcaatataaatggcacccccaccctctggatgtttgtcatttcacccttccttctttacctgacaatctcttaagagattcttggggggatgtaatacaccagccaggaactaaattatattcaactttctcaagtagatactatttcagctacgtttgggaaatgcttagccagaatttgaggtcactggaagaggtcatagaatcactcaggttcagacttgtggaattacttacactttccagaacctgtcatgacttctttggctccagggctttatacctgctgcttcttgtgctttggggtttccttctctcccaccagccctatccacagcacacacatgcatacacaaacatgtacacacgtatacacatgcatgcatgcacatgcgcacacatgcacacacatgcatacacaaatgcacacacatacatgcatacacacacatacacacacattcacacacatgcatacacatacgtgcatacacacacatgctgcacacatgcacacacatatacatgcacacacatacatgcatacacatgtgtgcatacgcacatgcatacacacacatgcatacacagcatggcctctgcttgtccttccagagtctcttataaagcttttcctgatattccaagtctcaagctagctaccctccttttttttttttttgtgactgagtctcacactgtcacccaggctggagtgcagtggcacaatctcggctcactgcaacctccacctcctaggttcaagtgattctcctgcctcattctcccaagtagctggaattacaggcacctgccaccacgcccagctaattttttgtatttttagtagagacaaggtttcactatgttggccaagctggtcttgaactcctgaccttgccacacccccatttttacagttttctaaccattgactattttccagtcttttttttttttttttttttttttttgaggcagggtctcgctctgcacccaggctggagtatgatagtgcaaccatagcacattgcagcctcctgggctcaagaaagcctcctgctttcagcctcctgagtagctgggactacaggtatgtgccacaacatccaagtaatttttaaaaattattattatttttttttgagacggagtcttgctctgttgcccaggctagagtgcagtggtgcaatctcggctcattgcaaactctgcctcccgggtttgagtgattcttgtgcctcagcctcctgagtagctgggattacaggcgcccaccaacacacctggctaatttttatatttttagtagagacaggtttcaccatgttggctgggctggtctcgaactcctgacctcaagtgatccacctgcctcagcctcccaaagtgctgggattacaggcatgagaaaccatgccctgcctaaaattattttttgaattattaattatacaaaaatcattagttaaaaatcattaaattttgtatttttagtagagatggggtctcactatgttgcccaggctggtctcaaactcctgcttaagtgatcgtcccaccttggcctcccaaagtgctaggattacagacatcagtcactgtgcctggcgaagtctttaccaattggcaataagctctctggttgtcattacagttccaacgtgccaggcaaccagtaaatgatcaataaatattggcattttgggtgaatacataggtcattagtgctactgttctgctttgactctcattcagattaggaacgagctccccctccaaataagcaagcagactagagactatttcctgagaatgtaattccgattcaattcagaatttgtttcatatgctcaggacttggccctcggagggctggggagagggaaacaagcaatactaattgtaatctctgccttcaattttcccctttttgaacatagtactagtgttggccacctctctgcactgcttcaaatccccccggtccctcctctcgctccatcagtgccttggtgaccactttcacgcaggctttgccaactgcacatgttcaaaggctcataggtgaaagagcacagtgcatccatggaacttcaagaaattcaggggagctgaagcaaagttcattcacggtggggaggagcagaggcagtgaggggaagaagtgaggatggagggctctgcatgggatgcagcatgaaggaccttccaagagtgcaaagttatgtatcctgatggcaaggggcagccatggaagattttgagtagggaagtgacttgatcagatttatgtttttaaaagattcctcttgctgcaatatgggaaattgaccagagggggcacagctggaggcagaagtccagttggtaattagacattctcaatctgcctatatgtgaacatcattaaagaaatacccagaggaggggtccaaatgtcactttttttttcttccaggtcccctcagtgattcctgtgtgcacccagggttgagaactactgcataagaggtcctagaagatatctggtatggccagagtacagagggaccggaggtaagccaggagagacatgcagagcaaagagttgaggtctccatcttctgtgggcagcatctggcctgttctgcttcctctgattctcaccaaagtgttggcccaaatgatttttaaatttgaattcattgccattattaaacatatatagatgtcacacaaaatatccagatttctgctcctctaagaaacttgggaggtctggccaccctgggcctgcatgcccccatggcaataaatcaagccctggctgctgcttcacatgtggcatggactctccgagctgccacagcccggccactctttgtcagttcccaccactgcagccaaaagccagctgctgtttttcatctcttacccagcctgtttgctcatttaagctaattgtctagtccctgttgagattggagtttagatctcaaaagctagactctacagggtgggtaggcctgttaatgattttgttatttaccctggaagcactgcaaaggcattggaaggtttcacgtagagcagcaataacacaagcaaatctgatgtcgaaagatcactctggctggccttggtggctgatgcctgcgatcccagcactttgggaggctgaggcaggaggattgcttgagcccaggagttggagacaaggctggcaagaccctgtctctacaaaaaaaattgaaaagttaaccaggcacggtggaacacgcctgtagtcccatatacttgggaggctaaggtgaggattgcttgagcctgggaggtagaggctgcagcaagctgtgatcatgccactgcattccagcctgggcaacagagtgagaccgtctcaaaaaaaaaaaaattactctggattgtttaaactccaggtaagcagctatttgactagacaataaggacaaatcaagacctcccccagtctcctctggctcttttatagaaaaacctttattatattcctgtagttaattttcagtaagaatggatattttcaccaatattttttgtcagaaataacaggagaaacagcaagttaggatgaaaatggaattgaactagatggtgaaaggtttggatttgaatcctaagtgactttgacactgattcttttaccttggctatcctcttctataaaatagaaataataatattagactctcctaagtatctcacagggtcattgggaagattaaataaaaaaaaatgaccagtgttttataaccttcaaagtgattcatggatgtaaaatattgttatcattattcatttatttaccaaactcacacccattcctactgtgtatttggcctgtgctaagtctggggatgtaaaaatgaatgagaccaaccttaaaggtctatggtctattggaagtagcagtgatgtaaagacataattataggtatatactcaaaagaatttaaaacagagactcaaactcacgcttgcatgccagtgttcacggcagcgttattcgccatagccaaaaagtggaaacagcccaagtgtccatcaacagatgaatggatcagaatatggtatgtatattcaatggaatattattcagccatataaagcagtgaagttctgacacatgcggcaacatggatgagccttaaaaacattacattaagtgaaataaggcagacgcaaaaggacaaatattatatgattctacttgtataaaatatcgggaacaggcaaattcatagagacagaaaggagattagaggttactagggtctcgggggaggtaggaatggggatttactgcttaatggatacagactttctgttgggggtgatgaaaagttttagaaatagtgatgatagttgcacaacatcgtgaatttaattaatgccactgaatttatgcacgtcaaaatgtttaaaacggcaaattttatgttatatgtatttaactacaataaaaaatagcaaaaacaaataaatgggtcagagttcaactaaagacaatagaaaaaagcgcagagtaaacctaaagaaagaataatgaaggaaataggccgggcatggtggctcatgcctgtaatcccagcactttgggaggccgaggtgggcggatcacgaggtcaggagatcaagaccattctggctaacatgatgaaactccatctctactaaaaataccaaaaaatatatatatatatatatattagccgggcatggtggcacgatcctgtagtcccaactactagagaggctgaggcaggagaatcgcttgaacctgggaggtggaggttgcagtgagccgagatcatgccactgtactccagcctcggcgacagagcaagactgtctcaaaaaaaaaaaaaagtataatgaaggaaataataaagataagagcaaacaccaatgaaatagaaaacaaagaaacaataagctgattcagggggaggtaaaagctactaaataaatatgtagtaattataataagatgtgctaaaagatgcctccaaagtgatatgaagaaactcctgaactccagaaggcttcaaaaaaaagacaagctttttgcagtgtggactaggggaggagagcaggcattttctagggcaaggatgtggtgatgaccatggagtctgccaagcagagagactcttgttctagtcaccattgttccctcttcctagtccaatgtctccaaccagggtacttaggaaatgttagctaagtgaataaacattttcctttagttctgcagtgtgtcttttgtctatccacaaattttatgacataaaatttcttatgccgtttatctataactttggatgtccaatcccacactacagtcttttatgacatagctgtgtgatgctattttattttgttttctttcttctaatagagacagggtcttgctatattccccaggctgatctcaaactcctgggctcaagtcatcctcccacgttggtctcctaaagtgctgggattacaggcatgcaccacccactgcacccagcctgtgatgctattttcctaaagacactacatgagaagctcctaccctttctccatttcagctgcaagaggctttcaaaacctaggcccgaaagctaaaaacttctgaactgttgaaatggggccgggcgcggtggcgcacgcctgtaatcccagctcctcggtgggctgaggctggagaatcacttgaacccgggaggcggaggttgcggtaagccaagatcgcgccattgcactacagcccgggcaacaagagtgaaactccatctcaaaaaaagaaaaaaagaaaaagaaaagaaatggaaatccacatgcaacaatggctatccaaataccttaaggatacatttgagggtgggtgtacccatcttgtgccccatctcctagaaactggtgtttgctgtgggcaaatgaggtgccaggagaaggtactattgctgcctaagggctgcagcacatggtcgtgcaggttgtctactgtacaagagttcctggcagaagcagggagggccgctgaaaaacagccagtattccatttaccaagtcgtgcaccctggggcttcatccccccatataaaagaagactttttctaattagtacaaatacgtcaggcaggtatgggctaattgcagccttgtgtccccagctgtcaccattactgtcctggctaggggagatttagtgtctgactctgtcccttcaaaagagccccctcaattctcttcagtgtcaaagcatcttttcagaagatcctttcaagccctttggtgagtgactaacccaccaccggcagtccactagtggagaattaccttctgccaagagaccttagttctgtaaaaaggcaaagaaagaaagataagctggggcaagaaagaaagataagctggggcaagaaagaaagataagctggggcaagaaagatgaactcattcggccacgctgctctcgccctgtggttgcttcttctgccactagatggcgtcctcgcctaagtactggaaacactttcctgaggatggaatttgagaggaagctgggttgcagccgctgtccgtgtggaacgtttagctgatcccagcttcattattatgcgatttgaaaatacctgctcatcctgtcaagaaattttattgagtggaataattgtttcatggcactcgtcaagttcatgcacagcctgtctccttttcttctccctctgactcctgcagtcagccgatgtttaaacccaggagacgcaggtcaagccacagggagctcagcttcctgacatccacctgagaaatgccaggagggcttactgataacataatggatgtcagtttaataaattctgactcaaggtgacatatagctatttacagagatataacatattaacatatatattaacatctatcattttagcattaatcatttcggcatctttttatttgaggcatcatttatatatttaaatgtatataaatgatgccccaaataaatataccatatacttaaatctataaatatataaatttattatttatttatatataaatacatggtatatttattatttatatatttatttattgtatatttatttaaatatatgaatgctgccccaaataaatataccatacacttcaaatgtgtgcctttaaatgtatttaaaagtgtgccttaagtgtacggttcagtgagtttaataaatgtatacaccagtgtagccaccgcccccattaggacacagaacacttccatcacgctggtacatcgtcttgtccaccttcaaagtcaattcccatgagctgaagaggctcaaggctcagagaagagcaaacagtgggtgaagggagtgtgtggccttcaggctaatgtgcactgtaagaggctaaatgagactcttgatcactcacagcctctgttttgtattttcctagaaaaatcaagtaatcatttatttttaaggaaaacaatggcattttaagagccacctcattttacctgacattttattagtttttctttcacatatataaatgcacaaaattctgtaaaatatgtttagtcatcacttcatgatttggttcttgtgacttttttttcactatgcagttgtcaggatgcagctgagaaaattatcagagctattcagtgagatcaattgtgtattttgaaaataatttttcctgaagagcctgatatggttttgctctgggtgctcttgggtgtccccacccaaatctcatctcgaattgtaatccccaggtgtcgagggagggacctcgaggtaattggattatgggggcggtttcccccgtgatgttctcatgatagtgggtgagttcatgagatctgatagtttaaaagtggcacttcccccctcactctctcctgccaacacgtaagacgccttgcttccattttaccttctgccataattgtaagtttcctgaggcctccccagccattcagaactgtgagtcaattaaacctcttttctttataaattacccagtcttgggtgttctttatagcatgtgaaaacagactaatacagggccaatccaagcattcttcagctcaggagtttaactcatttgtcagcttacactagctgtgtctttattactatgctagaaaaatgcgatgatttcgcctaaaagattgacttctttaatataaacttttaatggaagcataacatacatacagagaaacacacagctcaatgaatttgccaaaagtgaacacaaccatgtaatcagtgcttagatcaagaaacagaatattatcagaaccccagaaacccttctagtcaccccaagggtaaccattatcctgacttttaaaaccatagatgaattgcacttgcttttgaattttctatcaataacataaaataagaagtactgttgtgtgcctggctttcatcacacaatattaacatccacgttgttgtgtgtacttgtagtttgatatttctcttgctgtattgtattccattatgtgactatgccacggtctattcatttcacacacacacaagcaaatatatatatatacagggtcttgttctgtcgcccaggctggagtgcagtggcatgatcctggctcactgcagcctagaacttctgggctcaagtgatcctcccacctcagcctcccgagtagctgggactacaggtgtgcaccaccacgcacagctaatttttttagacactggctctccctatgttgcccaggctggccttgaactcctgggctcaagcaatcctcccaccttggcctccaaaagttctgggattataggcatgagccactgtgcctagcctcgtttcactattgatggacatgtaaattatttcggttattagttattacaaataatgctcctataaaattctttgaaaatgtcttttcatgaacactgttacgcattgctgggtcataggacacacatttgttcagcttaaattgatgctgccaaactgtttctcagtgtggttctaccaatttacatccccaccagcagtgtatagagtagcagttgctccaatctgataacatttggtataactagtctttttcattttggacattctggtgtgtgcagcagtatctcaccaggctttgatttgcattgccctgaagactaatcaagttgagcatttttttttaatgtgctatattggctattttgatattctgttttataaagtgctgttgaagtcttttaccaatttactgcaaaatatttgaataggcactttacaaaaatttaattttttctttatttttagttattcattttgagataattttagacctcaggaaaaagcctacaaaaaatcttgtgtttccttcatctggcttgatatctcgatatcttacataactgtagctaatctcaaaatcaagaaattaacattggtacccatcttcagagcttattacgattttaacaattgtctcgctaatgtctttttctgggccaggaatcaagccaggatcacacattgtatttacttgccatgtctccttaagtctccattaacctaagtcagttcttcagtctgtctttcgtgaccttaacgtctttgaagagaactggccagttagtttgtaaagtgccctcaatttgtatttgtctaaaggaaacactcaagttaaatatggttatggatctttgcaagaaataatgtatccttctcagttcatatcaggaagaacacaatgtcaatatactttatcagtggtaaagttagcttggatcatttggttaaggtggtatctgtcttgtgtctccactgtactgttactattttatttctcttgtagttaataaatatataatgaggcaatatgtaaatatcctgttcttctcatgcttttgctccatagtgcttttacttcgttgcttctctatatgatcttgctatgagcccttttttgatacatgtattgtaaatatcttatcctactctaagtcttgcttactcactctcttagtgtcttgatgagcagaaattcttaagtttaatataactgaatttatttatttttctttatggttagtcttttttatgtccagtttaagaaatcaaaccttcacctaccacaaggtcatgaagatattaacctatgtgttcttctaaaaatgtgttttccttttcatgtttgaatggccaatctatctgtgattcattcttatttaaataggtatcaaaattcattattttttcacatgatatccaactgatctagcatcatttatagaaaagtctgtcttttcctcactacactgccaactttgtcataaatcaggtgaccagaaaggtgagggcctgtttctgccctctgtcttccattccgtttgtctatttctctatctgtatatgaataccacactgactttaagtgtcatattgttgagtcttgatagttttatatctctggcattgatctttttcttcaagatagactttgctctttttgtcgtttgcattttggtctaaactttaggataggtttgtcagtttctatatacatacctcaaactcttgatgagattttttggctcatttgaatttatagatcaatttgggagcattacatatttaccatattaaatcataagtaccttcctccattatatcttctttatttttctcaataatatttttcttttttgagatggagtctgctctgtcgcccaggctggagtgcagtggcacgatctcggctcactgcaacctccaccacccgggttcaagcaattctcgtgcctcagcttcccaagtagctgggactacaggtgcaagctaccatgcacagctaattttcacatttttagtagagacagaatttcaccgtgttggccagtctggtctctatcttctcacctcaagtgatccacctgcctcagcctcccaaaagtgctgggattacaggtgtgagccaccatgcacggccctcaataacgtcttataattttcagtgtagtggtcttatacaacttccattgatttattcctaggcatttgatgtttgacaatttatttttaaaacatgactacacgagaagagagtaacatagagcagtggttctcaatgggaagctatttttgtcacccaggacatgtatggcaatgtctggagacatttttggcacaacttaggggtggtgctacaggtgtctggtggataagcagaaatgctgcctaacatcctccaatgccaggacagccgccccacaacaaagaaacatccagcccaaaatgtccacaatgctattctcgggaaatcccaggataaagttaagaacttccagaaagatatcacttcatagtcattatttttatacactgttcatggatttttatatttcacacgaagtgatttacagtgacattttcatcatattagtttttattactggggtgtgaataaaatgtactgtgttcagtttataaaaagatgttataattgttgggagataattctccatggcttctgtgtttctggaaaccttctgagcaaaaggcattgacagtttgattcacagatatttgcataacagacagtcttggaaagataaagatagtgactccctgcaaagagatttggagctgcctcttcctgagatattccagggtaacagagctagagaccgtgccctttattccctgaagatttgcttacattctccagggaggggccaggcacgatggcacacacatgtaatctcagcactttgggaggccaaggcgggaggatcgcttgaggccaggagtttgagaccaccctgggcaacatagtgagaccgcacctctacttttatttaaaaaaaaaaaaattctgttttttaaacccaggagggctgggcatggtggctcatacctgtaatcccagcattttgggaggccaaggtgggtggatcacctgaggtcaggagttcgagaccagcctggccaacatgaggaaaccccatctctactaaaaatacaaaaattagccaggcatggtggtgcatgcctataatcccagctatttgggaggttgaggcaggagaattgcttgaacctgggaggcagaggttacagtgagccgagattgtaccattgcactccagcctgggcgacaagaatgaaattcagtcttaacaacaacaacatccaggaggataagcaaatttgtgagcagtctccttctaagatgggggtttctgaggttcaatgttcttcagctgtgacatagacccactgtctgctcagtatccacctgggcctgcctccacatggcccctatgcgacttggaggtaaaagagaacctacgtaaacatgctgctcatgctgccagctgcactgtaagaaactgtctaaatctgtttgggtgtgttttctccttactggttgaatctatggaagattggtaaattgacctaacagctgcagtaatctctgctgcttagggattgcttgataatgacccattagcaaggcctactgccaatgtaggaacgggaggaggcactactaatgtcatatattcgctttctccatccagtagtgatgacagggaagtgctgctgggtaaggcaaaattatgtctccaccaacagttccccaaacctgccttttaggtcgatgggtttgaagtgctggccctgaggagtgctggcctcaagaagccaaaagccacgatgtcactatttatattaaaattcatgagtttgttgtagtcaccagtaggcctccctgtgtctaccaggatgcagaaggtaacaacatagggcctggttccatcccactcaatgtttgagacttatttcctggaggctgggtcctagttttattcttggggtctggagtctcctgcaatgactgggtctttgttaattaacttcagcacaactggctcccttcccttcttgcatgaggcttctcagacctctagtggacttttctatccatctgccagacctacccagacttgctcgaacttagcagtggccacaaacttagctcaagctgaaagctctactacaaaaacctgtatgaaagagctgagtgatgatgctgactctcgccctggactatttgcagctgctttgtttttgaaaatagccaacttaactgcagtcacttcagcgcaatccacatccacctagagtatttgtgaaaacaaatgagaccatgttgacccctatgatcagagcttattttcataatgatggcttggtttgatgacgcttgaatatgagctgcggctcagcagcagaagggcacaacctcaaaaagcagatgttttttaaaaagccaataattgaattaaaaaaggcttccttgtcagctgtcatgcatctgagtaaagggtggggtaggacacttccttggaagcaatgatctgcaaatgcattatttgactgtcaaactatgctgaactttatactgatatgatgcaaatgatgaacctccctgtggtcaaataaggtttctctttttgttgagctgcagcagttcatggcaaggaaaacaggttttggggaaggaaagaaagggtgtcgctcctttggggcaggaaaaaacagaaataccaaatgctgatgctatttcttagttacattttcttttctttcttttttttttttttttttgagatggagtctggctctgtcgcccaggctggagtgcagtggcacgatctcgactcactgcaaactcctcctgggttcatgccattctcctgcctcagcctcctgagtagctgggactacaggcgcccgccaccacgcccggctaattttttgtatttttagtaaagatggggtttcaccgtgttagccaggatggtctcaatctcctgacctcgtgatccggccgcctcggcctcccaaagtgctgggattacaggcgtgagccaccgcgcccagcccttagttatgtgttctgtagaatattagattttacccttgatgggagtggggttgtgggtgtcgctcgctgtgtctgtagatcaggtaaacgagaagttctgagaatatctaatatctgatatctagaagtgatataaactgggcaatacctcttcccaaacagcagtagagttcatcgagtaaagagtattacagtgttggctgggcgtggtggctcacgcctgtaatcccagcactttgggaggccaaggcaggcggatcacctgaggtcgggagttcgaggccagcctgaccaacatggagaagccccgtctctactaaaaataaaaaattagttgggcgtggtggtgcatgcctgtaatcccagctactctggaggctgaggtaggagaatcacatgaacccaggaggcggaggttgcagtgagctgagatcgcaccattgcactccagcctgggcaataagagcaaaactctgtctcaaaaaaagaaaaaaaaaagattactacagtgccaaaagcggaccttagtcaagaagcggtgctgatcgaagtcatgttgcttatcagttaccttgctatgccatacattatttagaggcccaggttggatgtggagcaagctgtgggtgccaccttttccttggagaccatgatctgtgactttcttaaggtcaccagttaggaaatggtaaagttgagattcaaactcctatttttattttggaatttagtgaggttttctttgcaaataaatatgttgtcagtttttgtaaatgtttagtagacaactgaaaaaaatagcctttaatagtaaaatgaagcattattaaaaacgcttgttcttgtagatagagtaaattttcatctttagggatattgaggcaaaatgtttatttacttaatgaaaattaacatctgaattagtcttaagatttactggaaaataaaacatgaagaattattggtgttaagctattaatctgctataacagctgtcatcttagatctaacaccagaaaactgttggtaaaaatctgcaatttggctgggcctggtggctcacacctgtaatcccaacactttgggagactgaggctggaggatcacctgagcccaggagtttgagaccaatctgggcaatatagtgagaccccatctacaaaaaatagaaaaaattaggtgggcatggtgggcatgcctgtggtcccagctgaggagcccagctcaggaggctgagccaggaggatcacttaagcacaggaagttgagacttcagtgagcagtgattgcaccactgcactccagcctgggtgacagagtgaaaccctgtcttagaaaaaaaaaaaaaagaaaagacaggaaaagaaaataaggtgttttctgtgaactctagtccagttcataaatattaattctgccttatgaataataatattcagatttgtccatttttggcctgttttaatctatgaaagacaaagcagaagctgtttaaaatttacttttgcttcatactgtaaaacttaaaaaatactttcttctttgacctcttaggtgttatgttttttatgttcccgaattttttttacagttctatataattttttatgcttactcatccttgaaggttgaaaactctatccatgctttgcatttgttccaatatgggatgagctattttttttttttaatctggccttactgaatcaatgagctaattctttttggctccctgcctgtctattttgatgctcttagaatcttcctctcattatcctaggctgcagggttgggtaccttccagcagcttgaaaggatggtggaggaagccatctggcaaggaaagtcaccctggcaaagtttcttctcaaggctttgctaacccactgtcccaaggagccaaaggttatctggcctctagtctctcctcctcactggccagcagccagactggacgtggcctggccatcctcctgagactaccattgccaatattgtaacagtgagagaaatcgaacatagctgactccatcttgcttctgacctcacaagctaactgccttcgtgcattcctgcatgtagactaagctaatcatggaaagaatttagattatagtttaactgtagaactaatgattacctctgttttgaaatagacccctgaggagataaggaagtatgcacacaacatttaaacaatgctgtcttgacgatttatagcaataacgtggacctgacaagcatttgaccatgaacaaagaagttttgcaacctccttggagccctgctgatgcccagatgtctgtggtcaccagtcacctctagaccttaacccctctctgttctcccttcccctaacataaaaggagccaaaaaaatccatgaacttaagatgattctttaggacactaggccaccattttctcagtttgcttgttccccccaaaaaagtcatcttccagccgggtgcagtggcttaaacctgtaatcccagcactttgtttctccggtttttgagataggaggggccctctagtagtgtcaacttgagtatagtgtacccacagttttattccagcaaacttcactgatgagtgggtattcagcaacatctcaaacaatcccattcacttgttccttctaggtgtcattccacagtcaccccttgtcaaccctgcccagttccactgaaagtagccaaatgagagacaacatcctgttgtccccaactccacaagattatggaatgaacctttgatactggggaattgtaacagtgaaagaaatctaacatagctgactccatcttgcttctaacctcacaagctaactgcttttgctcattcctgcctgtaggccaagctaatcatggaaagaatttattttatattttaactgtagaactaatgactatctgtcttttgaaacagacctctgaggaggtaaggaagtatatacacaagtaacaatgctatcttaaagatttataggaaaagggtggatctgacaagcagttaactatgaacaaagaagatgtgcaacctccttggacccctgctgatgcccagatgtctgtggtcaccagtcacctctggactttaactccttccctgttcccctttcccccaacataaaaggagcctaaaaatctatcgacttagggtgctttagaacactagtccaccatcgtcttggtttactggctccctgaaacaaagtcatcttccttgccccaacaccttgtctctcaacttgttggctgctgtgcagtaagcagtatgagctttggactcaactgcagtatcagaggggagacttgccactctgggaaaaaaaaaatcccctatttgcatgtcttgggccatttcagtgagtatttagagaggagattcagaagtctaggctaaaacccaattttacctggcagtgttctgcttgtctatcgctccaaaaaataacactcaaaattcaggggtgtgaaacaatcacaatcatttattattatctctcatgattctggtgattgactgggctcagctagttagttcccactcagaatgtgtcaactggctaccatgagacagcgatcatactggagtggccttgaaggcttcctagtcacatgtctggcactgagacagggaaaactcaaactgctggggcatgaaacagccaaagctccttgactctttattttcatgggttctatttacatgatctctgcaacatggtggtttcagggctgctgtacttatatactccaaaggcacatgttctgagcaagagagctaaccgatgcctagagctagatgaccaggtctccttttaagacccagttttgaaagtcacatagcattactttggttgtgcagtcacagaaacccatctaagaagcctacctgggttcaaggggaaaggacttagatgccacctcttgattgaggtggggggcagggtttttggaagagcacatgggactgaacatattgttgctgcaattctgaaaaatacaatctgcagcaggaagtttaatgcaacttgtagaattaataaatgattgtataccattaatagtaacacttcttgacacctactctatgagagtatctaactcatcgaaccgtgtgaggattaaatcattaatatcatatatttaaagcacctagaatactgactggcacatagtaagtgcacacagtaagtaaatgttagctgtactctatagttaagaaaaattagaagtctgtaactatagtattaactaattacccttccccatcattcaattctcagttgttcattctgctattccctttttttagaaaaaagtttcttggtttatgtccttgtttaggtggaaaagctttcaccatctgaaaacttcttaagaaaaggtacatgggagataaacattttgaaattgtacgtgtctggaatatatttacccccacatttgactgctaatttgtatgtgtatgagaatctatgttagaaataattttctctcagcattttatttacttatttatttaatttatttagatacagagtctcgctctatcactcaggttggagtgcagtggtgccatcttggctcactgaaacctccagttcccaggttcaagtgattctcatgcttcagcctcctgagtatctgggattacaggtgaccaccaccacgcttggctaatttttgtattttttagtagagatgggatttcaacaagttggccaggctggtcttgaactcctgtcctcaagtgatccactcaccttggcctctcagagtgctgggattacaggtgtgagccactgcacccagcctactctcagcattttaaagacattattccattgtctttcagtttcatgtgttgctactgagaaatcagatgccattccgattctggatcctttatgtgaaaccttatttcctcctgggtacttgtaagatcttccctatgtcctcagtcttctaaagttttatcacaatgttgccttggtgtggttctggttttgtccattgcactatgctcagtgagcactttcaatgtggaaattcatgctctttagttctcaaaatatataattgaattatttaattcatttcttcccctgtttcccagatgtccaaggctggctttctaatcttcttatcctttcttatttctttcccttctctttgccttctgtctatgcattctaggatattttctaactttatcttcttaacattctactcagttttttatttttgctatcagatttttaatttaaaagagctgtgtttggttctatgagtgttccttttttagggtatttatttatttacttattgagatagtgtctcgctatgtcacccaggctagagtgcagtggctgttcacaggtgtggtcatagcctcaaactcctgggctcaagttgtcctcctgcctcagcctaccaagcagcagggactacaggctcatgtcatcgcacccagcttttctgttttatttgatctttctcagagaagatcaataatagatttctcagttttcttctccccctatactctttttcttccttttctcttttttcctgttagcatgttttgggttctgtttttaatgtcagatccttcccctacattgtgatgaccttcagctgcctgctcttacttaagtgtgccagatttagcaacaaaaagaaagaaaaaaaagacaggacatctggttaaatttgaattttagataaacaatgaataatttttagtataagtatgtctcatgcaatatttggacatacttatagtacataagtattttatattttagtaaaacattaattggtgtttaactgaaaatcaaatctaactaagtgtcctgtattttatctcgcaaccctaagagtgaggtctacaaagctgcctggaagccctgagtgcgtgtgtaagtgggtggggcttgacaagggtgagtttaccaacaggttgctccagtttcattgcataaatgattacatctcttcaggtctttcctcttagattccccaaagaaaagtattccaaactctccagcctggtgagtttgaacttggctgccagagttctaggagccaagcgggaagaataccaagcagctcagtaggcatcatcttaagtttcatatggctcttcaatttcagtacagtagccctagtcttgtgttaatctcatggccttgatgaaagatggctgcaaattctttgcaccctcccacccctccccactcagggatggagcctaatccccttcccttaaatctagactggccctagtgactggcatgatttatagaatgcaacagaaataatgttcaacagcttccaagcgtgcataagaaggcttgtaacttctgcctggatgtcttggagtaaactttctggaaaccctgagcctccatgaaggaaatctgaccctgagcctgccatgtgaaggggcatgtgtagatgctctagttgacagtgccagttgagaccaaccttccagctcttcttatcatggtacccaatatgtgagttctccagactggcccatctgccagctggataacaccaagtgacctttcttgatgccaggtggaatagaagaattgctcagttcaaattcagacccacaaaatcatgagatataatggtcactgttttatgtaaccttcaagtgttgggatggttttttaggcagccttagataaccagaacacctcaactacatctgatgtccccattccagagagccactgcatgattcttcagagaacatccttccaatcatccaccctcgtggaagagggaccgtggccactgtgcagtgttgggaatgctgactgcttcttgtacagacttacaagaaatcgtcctgggtttagtctcacctacacacccactttcagacacatccagtgcagcaaactctcctatcccgagaaatcctactgtcatgttgcttctcggttttccctactcctggtttggaagtcggctttctgaggtctgttaagtcagttatcacctgtccacgtgctttccaggttccaaactcttattatttttcctctcttgttcccttgtccttgtgagatttttaatttttttttatttaaaaaagtggtttttttaggggggtggggtggggacagagtctcactctgtcacccaggctggagtgcagaggcatagctcactgcagcttcaaacccctgggctcaagtgattttcctgcctcagcctccccagtagctgggactagaggcgtgcgtcactaggcttggctaattttttttttttttttaaagagacacggtgggtgggagagagagtctcattatgttgcccaggctgatctcgaactcctgacctcaagccatcctcccaccgcggccttccaacgtgctggtgttacaggcgtgagccacagcacccagccctatctttaatttaaaggctccttggagtggaatttcaacaattatattaattttttaaatactcttagatcaggtttcctggaaacagagcctgaccctaggattcttgtgcaagtgctgtagtgagggtattctcgagggaagcctccgagtaagtgagggaaataggataggccagagggagaaactgagcaaagatatggtttctgatgaagtttatcctcagtctgatcccatgggaactctggcatatgaagggtaccacagatttattcctggccttttataagctaaaaaagttagcctctggccatggcttcctcagtctggtctgagcgcagatgtcagcagatgggggcaatgaaggggcagtgacctggggctggatgcacccacctagtaaaggttatttacgcggggtgccaacgcatctacttcattcctaaactttatttttttcatgtagcttaattttttctttctttttctttttcttttttagggacaggttttcgccatgtagcccaggataatctcccaaactcctagcctcaagcaaccacctgggcctcccaaagtgttgggattacagtctgagccacctcacctggcctaattgttgcttgtaagggatgcagtgtctctctaatcttgcttaagaaatgaattatctgtatttcattttttttcctactgtttgacctttaattttttgttttgttttgtttttgtttttgtttttgttttgagacaaggtctcaccctgtcgcccaggctggagtgcagtggtgcagtcatagctcacagcaacattgaactcctgggtttagagtgatcctcctgcttcagcctggctagtagctgggactacaggcgtggctatgcacccggctaattatttatttattttttgttttcttttctttttttctttctttttcttttctttcttcctctttttttttttttttttttttagacaatgtctcactctgtcgcccaggctggcgtgcagtggcgcaatctcagcttactgagcctctgcctcccgggcttgggtgtttatcccacctcatccgactgaatagctgggactacaggcgcatgccaccacacccggctatatatatgttttttttttttttttttttgagatgggatttcaccacattggccaggcttatctcgaactcctgggctaaagtgatccacttgccctggcctcccaaagtgctgggattacaggcatgagccactgtgcccagccttaattttttaagttatcatatgcagataaaagaggcagaaccagttttagtatccaaatcagtctgatcctaaaacccgtgctctaaaccatattaaaccaccttttaaaattacatcttaatgaaataatttaatgttacctctccagctttaagggtgccattaaccacttagattttgatgtgtcggatggaaaacactccccaaacgggctattctctgttttttaaaaaaactgaatttgcctatagactcaacggattcattctgcaagcattcactacgtggcgaaatcggtgctgggcatgggtgcaaagacgacctagccctagttggtgtcttcaagaggctgcgtccagcaggggaagcagatatgaaaacacagaactattacaagggatgagcgccgcgccaagccgaacctgggagctacggacagtgtctaaactttagtcactcacaggagtacaaagatccggggctgctcctaactcctactccaaagctttcctggcctgctgggcgcacagggaagagggaagtgctggaaacttttgggaatgtgtgttttcatgtgaaagaggggaatgaaatgtatccttcagatttcactttctacttttccggccacgggctcggcacgacctgccgttgggagacgaacggtttcccgaggtggggggaagcgcggatttgccgcgggactccggcttggcgcggagctgggcgcggcaggcgcagggaggaactggcgaggtggcccgggctcggccctccgagggtgtggagcgcccgggaaacgggaccccaagaatccaactgctcccaccctgcgcggccaggagcggggctggcgatactggggacactgtccaatccgggcagggggcgaggccgggggaccgggcgggcctggggagcaggcacgtgtggagggcggacccgccgggggtcgaggcctgcctctccgagagctcctggcgcggccgtcccggcccggggccccaggtgcgcttcccctagagagggattttccggtctcgtgggcagaggaacaaccaggaacttgggctcagtctccaccccacagtggggcggatccgtcccggataagacccgctgtctggccctgagtagggtgtgacctccgcagccgcagaggaggagcgcagcccggcctcggtacgaggggtaaaggggctccgggccgggggtcctgggctcagggaacggggagcgtggcccgggagcgtctcgcggggatgcccggctccgcgctgcaccccagagtgggtgctcgccgccggcttgcgggcaagcccgggcggccacagggtggagggggccagcgggccctggactcgctccgggtgggcgagagggaggcgagcgcggtgcttaaccgctggcaccatccaggacatccagggccgcttacacggctcaggacgcgggtcagagaccacggcagttatttattcagtccatgtgctaggctttgcatcaaaaagaaaggaccgagataatcttgcctgtagctaactcctcctaacacctcttacagtttactttttaattctttactccatttaagaaacttactcctttctcctagatccttaccactttcttaccttctcgtgtgtctaatgccctcggcacagtgcccggcacatcggagtctgattattatagggtccatgacttgagttggctggtggcgcagtctcagcattttgtcatgactttgaccagctggagactttggtgccaaggaggaaggcttctcaaccatttaccggcagaagtgacccccggggcaatgcaagtcttctgagctgacagagcagagtgggtcctgcataactcgtgctttacatggaactgggcatctgctctctcctgctgacagtgggaaggatagataaggtgtccctctccaagttatccattctcctgcccaccagtccatgacaccccaccacccccttccactccctactgtttgccctttaattttttgttttgttttgttttgagacgaggtctcactcctgtagcccaggctggagtgcagtggctggatacagttcactctgcctcccaggctcaggtgtttcacccacctcaacctcctgagtagctgagactacaggtgcatgccaccacgtgcctatagtctcagctattcaggaggtaactggtaactctattgataaccaaaccctagatttttttttttgagatggagtcttgctctgttgcccaggctggagcgcagtgatatgatctctgctcactgcaacctccgccttctgggttcaagagattctcctgcctcagcctcccgagtagctgggactacaggcgtgtgccaacacgcctggctaatttttgtatttttagtagagatggggttttaacatgttggtcaggctggtcttgaactcctgacctcaggtgatccacctgccttagcctcccaaagtgctgggattacaggcatgagccaccgtgcccagcggccaaaccctaggtttttagttgccagggaattctcagacacaggtggaagagcaagtaggagaggaagtggacagggataagaaaacggataaccccatgacccaagagctgctgactctccagagccctatcaggccaaggccatcctcattcagctcatgtcagatttctgttgattgaagatagagacacaagtacacccctgcccccacccacacatagacaggcacagacacacaactactggatcaagggcttctgtgaatttccctcctagatgttcttgcatttggttagggataatgtttctctgcaagcaatttagagagtaacccgcacagtcaagccatgtaccactccaggccttggtgtttaaagggtgagcctcctggtcatccccaggctcatgtccagtggcatgtttctttgtttatgtccagccactcatttgttttcctgagctcatttattatctgcttttagactaagcctgcttttctccaagggagataaagatgagtggcaggcactggggattgtgggcagtgtgccagggagtacctgaagttccagaataaacaaggggtggggaagcctgggcaacatagcaagaccccgtctctacaaaaattttaaaaattacttgggcatggtgacacccacctgtagtcccagctacttgggaggctgggagggagtttcacttaagcccaggagttcaaggctgcagtgagttatgatcacaccattgcactgcagcctgggtaatagagtgaggccctgtctgaaaaacaaacaaacaaacaaacaaaaacaagaggaggagattttctttgagtgtcatttttacacaaatatttgaaattaaaaaacactttttatactaaaacaatcacagatatattttgaagtagaatccaaaaattgtataccttttaaatctaaaacaagaaacctcaaaaacattttgcttgggatttgagctgcaatttggtccaaacctagcccttgagggtttgttttcactgcaattagggctacttatggaggcagtttgatagacactgcagtgtcctccctggagcaactttgagtaacactcatcctaggctgtcttatctaatcttcacttcaacctgcaatggggttattaacgttggtttacagctgaggatcccaaggttccatatcataatccttggtcaagttcagaccatttgtgaacgaaagcttaaatccagctgccaggatacaaaagcctgttctcttatcctctctgccctaccataactccatcagtgcttggttcatagtaatttggatttgtggcttcgtagattgttaactaaatcttgaacaagtgttttcctttttcttattttcttcttgtcaagctgatatgaaatggggttgaatgaacaagaactgtttcaactggaaagggagcacactgctgttgtcccagctacttgggagcctgaggcaggaggatcccttgagcccaggagtttgagactgcagtgagctatgattgtgccactgcactccagcctaggtgacagagtgagatcctgtctctaaataaaaagaaaaaaaaataagtttgcagtgagtgtgaggggtgcatgctagccagcagccctaaatgccagaggggtttgacatgtggataagggaataaactcgctctttgaggtgtttggcagagctgggtggtgggctctggttgaatttgaggaagtagtttttaaaacccataggctgggtggccttgatgttggcgagagctctgtcactacaagtttaggcagaggttcacagcccttttctgatggagctgggaagggttagcagattaagctcagttaacttctaaatctatagttcccaaacttcagggtgcatcagaatcacccaggaagcttgtacaatatgcagattctgcttatttaagcagctccttggatgattgtgattcaggcctcactttgagaaactatgctttattttttttatttttttattttttgagacagagtctttctctgtcactcaggctggagtgcaatggtgccatctcagctcactgcaacctttgcctcccaggttcaagcgattctcctgcctcagcctcctgagtagctgggtctacaggtgcatgctaccacacccagctaatttttgtatttttagtagaggtggggtttcaccatattggccaggctggtctcgaactcctgacctcagatgatccgcttgcatcagcctcccaaagttctgggattacaggtgtgagccaccacgcccggctgagaaactatgctttagaaacacttatatgaatatgtgcatacttcataaattgaataaagcattaataaaaacatatcaccttcccaaggaaacttaggttttggtcattatgtataaactctaggtaatgtggtaaatgctaaaaccttccttctcaaggatagttcttttgtttgtttatttgtttgtttgttttcgaggcagaatcttgctctgtcacccaggctggagtgcagtcgtgcgatcttggctcactgcaacctctgcctcccaggttcaagtgattctcctgcctcagcctcccaagtagctgggattacaggcacacgccaccatgccaggctaatttttgtatttttagtggagacggggtttcaccatgtttgccagggtggtctcaaacccctgacctcatgatccacccgcctcggcctcccaaagtgctgggattacagatgtgagccactgcgcccggccaaggatagttctttattataccaatcacatctcccttgtgatttgattaacaggttttttttcccctgcaaactcaccacatagtcttatagtgctaacacctctagaacaatgtagagctccaactaaaggtttttttgtttgtttgttgtttaacttaattgaaactgaatagattactacattaattccctgaggaatttaggatttctatctaaggcttgttgttggttttatcgggagtaatttattagtgtttggttttgtttgaactggactgagagcttttgctatgggaacctgaaccaccacctttgaagaattctttttaaagattcaagttgtttgatgtcagtaaattgccataatgcttcttggtccacactgcttgacgtgaaaaaacagagtgaatattatattgcagctaagtgtcagactgtaaattactacggaaaagaccttctacagcctggtcaacatggagaattctgtctctaccaaaaacaaacaaacaaatgaaaaaaaaaaaactataaaaattagccaggtgtggtggtgcactcctgtagtccaagctatatgggaggctgaagtgggaggatcactggagcccaggaggcaaaggttgcagtgagccaaaattgcactactacactccagcctgagtgacagcaagactctgtctcaaaaaacaaaaacgaaaaatccttccattttcctcctcctccccacgaaataactaacccttgaggcctagaagaaacacacagaacaagcagcctgacatgtaacagagcaggaagcccccccatgtccacctctacctcattttgtcaagtcttcaagagacctccaggcccagtcactgtgaattcattcctctgggtttaggcactcacctccccgccaccccagagaggtagcatattaaatcattaacagaatctaatataaaggggccctgtgattactgggaacaagttctcctgatttatatgcgattgaaccatattccctggagtaggtcctttagagctataagcccttgccatgatcagcccccagcatcttctctcttactcctctacaggggacttaggaaaacattttctgagtcttacccaactttagcttctgctattgctactttttgatgctgtgcaagcacctgttgactcagtggttctcacccttcttggagtcacagacccttataagaatctgactgaagccatggatcctttcttgataaaaataaatacacacttaacatttttcgtacaatttcaaggagtttatagacacacttctaaactcagtcatggatacaggttgagcaatgtgtaatgagttgcagtcaaaactacacaaaattgttacttttttaattttcagaaagggggtcttgctctgtagtccagcctggagtgccctggtgtaatcatagctcaccgtacccacaaactcctgggtttaagcaatccttccacttcagcctctagagtagctgggactacaggcatgcccagcttattattattattatttaaaaattttgcatagatagggtcttactatgttgcctaggctggtctcaaactcctgggtgatcctcctgccttggtctcccgaagtgctgggattacaggcatgaaccactggcccgaaattatttaaaaatattgtataaaattactgtgggggacaagagaacggatcccctttgccctctgaaggtttgctgaaaaatcaactcacaaaaggagataattagagaaaaggcaagccaggcgcggtggctcatgcctgtaatcacagcactttgggaggctgaggcgggtggatcacgaggtcaggagattgagaccatcctggctaacatggtgaaaccccgtctctactaaaaaaatacaaaaaaaattagccgggaatggtggcgggtgcccgtaggcccagctactcaggaggctgaggcaggagaatggtgtgaacccgggaggcagagcttgcagtgagccgagatcacgccactgcactccagcctgggcgacagagtgagattccttccgtctcaaaaaaagaaaaaaaaaaatgagagaaaaggcacacatgcggaaaatacatatattatgggggaatattaattttgcattatttttcattaattttacattatattaatatattaattataaaattataactatcttttataaattatattacataaattatgttaacttgcattattaattttacatattaatttcacattaattttatattaatacatattttatgggggaatattcattttcccccatattatacatgaaggaaaatcacagagtgaatttacttaatattccagtggggtgcagatgcttgtataccctacttctttttttttttttttttaatacagggtctcactctgttgcacaaggctggagtgtagtggcatgatcgtggctcactgcaccctcgacctcccaagctcaggggatcctcccatctcagcctcctgggtagctgggactataggtgcatgccaccacacctggctaattttctgtatttttttgtagagacgaagttttgccatgttgcccaggctggtttccaactcctgggctcaagtgatccacctgcctcagcctccccaagtactgggattacatgcgtgcaccactgtgcctggcctacaccctactttttagaggaaagagagttgaggaagtgtggatgttttagggaggtggcaactgatgtttgggggaattcagctggctcgaagaacatacaatggcccgggacagagcctcttgggcccacagaacagacaatggtttgtgacaaaagtccatccaggtgtgttgacagacttttgtctttcctactacaatatgaattcagctaatgaaaactcagggaagggactaggggtaatggtttccttttttggtaggtccagactttagtcagataagggaacttcagagaacaactttgggagagacagaggattgagagacaggaggtaggaggggggatgtctttggttcagcatgtcaaagcaccatattttgggatatcagtttctgagccccagcagacatacacattgcagccttgtttgtagtagcaaaatagtagaaacaacctaaacatcagtaaagatctggttaaattatggaacatctatgcagagtaatactatgtagctattaaaaaatggtgcaggttgataggaactgatatagaatgacagtgaagatattttttaaaaagtaaagtacagctgtgtgtggtatgctaccattttggtgtataaaaatgatggaggctctcacacctgtaatcccagcactttgggaggctgaggcaggcggatcacttgaggtcagaagtttgagaccagcctagccaacatggtaaaaccccgtctcttactaaaaaaaaaaaaatagctaggtgtggtagtgcacgcacataatcccagcttctagggaggctgaggcagaagaattgcttgaacacaggacggaggttgcagtgagccgagatcatgcccctacactccagcctgggtgacagagcgagactctatctcaaaaaaaaaaaagaaaaagatggaggctgtctatattctcatatgcttattagtgcattaaatacttctaggaggatacacaggaaaattataagagtggttgcctggggagggggaaggaaagtcttacagacttgttgttatgtacttatttgtactatttgaatttgttatgtttatgtattaccaattaattaaaaaaaaatagtgttacagatatcacctgcccattgaacattgtttgtgaagaaggagaattaaatagaaatgaagaatgtataattatcagatttccaaccttaaaattaacattcgatcatatacttccttatatgtgtacaaaggactagcatgcaagtatccttcagtttccaatgagatgaagcagccaccgctcattcttgccgtgtgtttcacttgggtagctggttccaaaagaatgtaaagtgcctctagttggatggtggagaaagttctgcttttggttttgttttgtttttgtttttctaagacagggtctcactctgtcaccctggctggagtgcagtggcacaacaatggcacactgcagcctcaaactcctgggcgcaggtgacccttccaccttagcctcccaggtggctggaactataggcacgcgctgccacacccagctaattttttgtattttttgtagagacagagttttaccacgtttcccaggctggtttcaaactcctggagtcaagccatctgcctgcttcagcctcccaaagtgctgggatgacaagcatgagccatggtgcctgacctagctctgtttttaaatggtctgattggttccagtgtgtctttagctgcagaagcagagagaggaggtagatgggataaatcagggcctgtagactaggtagacctgctagggcaggggcctttgtcagagaaatgtctcccagtgatatcaatggccatgggcactgaggggcctgaccttggctttggagcctggacccctatcttcagccagactatgtcttagtctgtgagggacctgcctctctctgctggagatgttgatagctaatgttcaccaagtgtcttctatgatcctgaccctgtgccagacatctggtatgatattttattaaattttcacccatattaggtgggtactagtattatcattgccaatgtaaatgaggaaactgaggcacaaaggggttgagtaatttgctcaaagttgcacactgacgagcttcacagccaggatttgaacttgtcagtatgactctatatcctatgctttaccactctgtgtaataggttaaaagtgggggaatcaggccagccgcagtggctcatgcttgtaatcccaggctaagcaggtggattgcctgagctcaggggttcgagaccagcctgggcgaaaccctttctctaccaaagatataaaacaattggccaggcatggtggcacactcctgtagtcccagctactggagaggctgaggtgggagaatcgcttgggccttggaggcagaggttgcagtgagccaagatcgtgccactgaactccaacctggatgacagagtgagaccctgtctcaaaaaaaaaaaaaaaaaaaaatacaaagtggggaaatgagcagaaaaagacagggctgggagattaagctatggggatgaattctttcagaggggaaggaggagagcctaagtccaaaccacttgtccaagatgaacttgatattgatttaggtcattctgagtatctaggggatccaggtgaggagtggagagcagaggctgaatcaggaccatgtgctgcatcatgactctggtggcccatccttctgggatcaagacttagggcagcatctaaaggcaggggaggcagctcagaaccttggcgtagggtcttcaagaggtaggcaggaggtcagtggcctctgccaaatgggcaaaggtgcatttatttattatatatgtaagtggcgggcactagagattcaagaatgaaacacactgactcagggagataagtaaatcaataattaaaaaatcataggactgtatgatcagtataataatttgatatatatgtgcagactgccatggagtaacagaagaggtgcacctaactctatcattagtggtcacagaaggcttcctggaggaggaaggtttatattgagccagggctggagaagaagggcttatgcacagttgtggagatgagaaagctaagccaaagcacactgaaggaatggcatgtctgttacagcaggcaagtcccagaggtggagatggaggttccttagaaactaagtccattctgtaggtgtatgggagacagggcagatgagtattgagggacaggtcctagagggtccaaggatcccatgtaaggaactgctggcctggaatataaatccctacttccctttgcatctgttccagtgcctggcaaagttatgtaataaatgttttcagataaaatgaaagtgctgggtaccaggaaggaaatcaaggcagagatttagccttggagaaacatgactccttgcttccctgcttaccctgtccagacctccaatattcatcttcgacatggtctccttccctgattgacataatctgggtcaggggcctctcctacacactcctgacactttctgtgatttccccagcatgggaatgggaatgttcacaccttattatatctgatcacatacctgcctcctctcttcagctttgagctccactgagggcagggacgatgcagccccctctggctagcacagtgctgctgagcacatactcggcccttgctagaagtgtgcagtatgaatggacaatttcccatggcctagaaaatttagtccaccctctaggcctggcctgccacaaaaatgatccagttttgaaaattacttctgtagctcttgctccgttcatggtgtccttaaactcccactcaactccaagctaactagtcttttccaaataagtcttaacgttcataatcatagcaggagctttgcttttactgtttactctgcttggaaaattctttccctattgaaatcccattattattcaaagcctaagtcacgtgagagctcttttaatttcttaggtggacgttgtccatcttcccctaccctgcaattcgtaatagttctcacatgccgctttgtctttaaactagttatgtacctgttctatttctcttagattacgtgcttcttgagagcaagatcatgtctcctccatctttctcttgccatgcctagtatatgataggggcaaaataaattttaagtaaggactatgagtgcctgcacacatagcgagtggcagttttggaactggggtctgaaaaccacttgcataagaatcagggcctgggctgattcttatgaggagaatgccagggttgcttatttaaacttgattaaatgaagtctctggggcccacccaagatttccagagtcaagggtcctcaccgaaaatctatattttaactgctccccacgtgacttttgtgtacttttgaatttgagaactttcctcaggtaacaagctagacagatgctgtacaatcgatattaagtagaatccttttgaagctgtagctccagacatcatgtcctgacaacatccagggccaggagaaagggggaatttggctggctgactctgtctttttagcctggaggaacttcaaagcgtcttagcaggtttgtccttatttctttttggtcagaagtgggtcacatggccactcctaacccattcatggctgttcaaagggggttgccttggaccacttattatttcctcctggggctagccccaccttcctggtttaccaaacccaatctccaaacagaaagaagtttctcctaaggaagaaggaaggtgtagtggaggttgacattattgctgattcttgcaaaaaagtctgtgcattgcaataactgctactatcccaattttatgccaaaataaaccagctctcataggtggggttaaatctggagggcagaacagggactggaacttggttcttgttctggattctaagcctgaatgatcttcatgacagcctatgccagcatccatctgtgggaagagaatttaatttgaagtttcacagatatcatggaatatcagatctggcctaccaggagtaatgcatgtttgcagtggatggttttgagaactctgctgtttaaataatctttggcaaacacagtatttcctaagtcatgtttatgcaagtgttttaaaagtgttataacttcccccattaacataacttatccccgttcccatttcctcatacttgatgtaaggtcatgattggcgatctatacttacgaaatgcccatggtgtggtttggggaccctttcagacatcaatagtttgagtctagaattattactatagaaccagggttctcaaacctcagcatgtatcagaatcacctggcgggattcttgcactttacaaagattatttatttttattttttagagatgggggtcttggtatgttacccagactggcctcaaactcctgcactcagggattctcccacctcagcctcccagtagctgagattacaggcacaagctaccatgcatggcctggaggcttcttaaaacccaaactgctggatcccatccccagagtttaggattctgtagatctagggttgggcctaagaattgtactttgaacaaggtcccaggtgatggtgatgctgttggtctggaaaccacacttttagaacaaatgatactgatctgggtttattgaaaagatgatataataggattttatcatgtgtaccacacacatcctatcctttccaggttcttttatgctccctcctaaggctgtcctggggccttcccctctggctgtgttttgcacagagggattcacctagccttctgtattttggtgactctaggctgggcttgttctttggaagtgagaaggtagagtgaggtctatgtatcttccctccaggcctggttcattgtctgtatacgaaggtggctctaaatgttggtcttgaaattttggtttcactttaaaaggaatgaaattctattagatggtacagcatggacaaaccttgaaaacatgctaagtgaaataatccagacacagaaggataaatgttacgtgattccacttatataaaatacctagaatagtcaaactcatagagacagatagtggaatagaggttaccaagggctaaggtgagggggaaatggggagttactgtttcacgtgttcggagtttctgtttggaatgatagaagagatctaggaatagatggtggtgattgttgcaagacattgtaaatgttcttaatgccactgaattgtacactttaaaatggttaaaataggccaggaacagtggctcacgcctgtaatcccagcactttgggaggccgaggctggcagatcacttgaggtcaggagttgaagactagcctggacaacatggtgaaaccctgtccctacaaaaattagccacgcatggtggcctgcacctgtagtcccagctacttgggaggctgaaatagtaggatagcttgagccagggaggtcaaggctgcagtgagctgagatcacaccactgcactccagcctgggcaacatggtgagaccctacctcaaaaaaatttttttaatggttaaaatggtaaattttgctatatatatgttaccatgattgaaaaaataaatcttgcttttgttattcttctatctcccagtgatgtgctgaattgtccttgtatcagcccctgagagctagttgttaaatttttagaggttttgcaagctgattgttaaaaatagccagccgtgatttaaaattaaattatatgaactaatgagtaaataagttatattgaaatatgaatatttataagtaatttgtatttaaaacaattcatcatttcctaattctttttcctaccttttaccattatctatgctctcgagggtatttatgtctattatatctgtgtggtgaaactagtattaatgtgtaatggggtgctactgaccatctactcccaactccaagttgagtgacatcacattagtaacttgaaattggtcagggtgcaaagatttacaccaaaaaagtggctacacatcagggtgtcctttccttggagagctggctattagctttatcagcatatccctggccttaccttgtgggttagggttggtgtaagtttgtaggaataaaacaccagtcacttggaagctaccagcccagctttctttaattgaatcctaaccctttccaaatagccctgccttggggcgtttttgctgtgcctaaaaaaaaagggtggtggctgagtttagtagcaggggaagatgagtcacatagtcagctagttactttttaacctcatgggtgcctttcctcaactgtaaaatgaaaggggtgggagaaaaactagtagaaataaagtaagatcatttttctagcaatgagaaagagatactttttaaaaaaagtttttattactgatcacagccagttacagagatttctttgttccttctctacttgtactgtttcccttgactagctttaaaaaaagcttttattatgaacattttccaatatacacccaagtgagagaatagcaaaatgaaccagacttttctaactattgaaatattataatgaggaatacaaaggaaaagatggacaggtataatttaaattttttcttccaaattttgactatacaaaactaaaagaagaatattaaattggaaacatacttagaattaatttttggtataaaatattaaaatttataatatatgcataatgtatatgtcagtaaagcaccaagatcctaaaaatgggcaaaaaatacacaccaataattcacaaagaatacaagttttaaaaaaagaaagattcagtgttcctactacttattaaattaattaattaattattattttttttttttagacagagtctcactctgttccccaggctggcgtgcagtggaccatctcggctcactacaacctccacctcctaatttcaagcaattcttctgcctcagctttccgactagctgagactacaggcacgtgccaccatgcccggctaatttttttgtattttcagtagagacggggtttcaccatgttagccaggctaatcttgaactcctaacctcaggtgatctgcccgcctcagcctcccaaaatgctgggattacaggtgtgagccaccgtgcccagccatttttgttttatatatatatatatatatatatatatatttttttttttttttttttttttaggtggagtctcgctgtgttgcccaggctggagtgcagtcgcatgatctcggctcactgcaagctctgcctcccgggttgatgccattctcctgccccagcctccctagtagctgggactacaggcacctatcaccacgcctaattttttgttttttttttttttagtagagacagggtttcaccatgttagccaagatggtctcgatctcctgacctcgtcatccgcctgcctcggcctcccaaagttctggggttacaggtgtgagccaccatgcccagccttttctgttatattttaaaagataaatcccaagaagtagaattcttgttgcgtggtgcatacaatttactaatggccaaattgccctccaaaagtactgtccagggccgggtggggtggctcacgcctgtaatcccagcactttgggaggccaaggtgggtggatcacgaggtcgagagattgagaccatcctgggcaacatggtgaaatcggtctctattaataaaaatacaaaaattagctgggcatagtggtgtgtgcctatagtcccagctacttgggaggctgaggcaggagaatcgcttgaacccaggggatggaggttgcagtgagccaagatcgtgccactgcactccagcctgggcggctgaatgagactttgtctcaaaaaaaaaaaaaaaaaaaaagtactgtccaatttatactccccacctgcagtacaggagagtatacccaatattgtgtcttactctttttcatctctatcccagtgtagtaaacatgaaaacaaatatttgcaacctctgcctcctgggttcaagcaattcttgtgcctcagcatccggcatagctgggattacaggcgtgcaccaccatgcccaggtaatttttgtgttttttgtagagacagggtttcaccatgttcgccaggctggtcttgaactcctggcctcaagtgatctgcccatcttggcttcccaaagcgctgcgactacaggcgtgagctaccgtacctgacccctactactaaggttaaaaggagaccaagcacagaggcttacgcctataagcccagcactttgggaggctgaggcaggaagattggttgaggccagaagcttgagaccagcctgctgggcaacatagggagactctacctctgcaaaaaaattttgaaaattagccggaagtggtggcacatgcctgtagtcccagctactcaacaggctgagatgggaggattgtttgagcccagaagttccaggctgcagtgagctatgactgtgctactgcactccagcttgggtgacagagtgagaccctgtttcttaaaaaaataaaaatgataaggcaagttaataataataaggttcaattttacgcctaaatattaaattaagaataaataaattgagcaagcaagctaacttatgggtggttgggctttggatatccttataaattttgaggacaactagaaatgttcataattatcagatatcacaaggaataagccaacagaagtaagtatctacaaggctaattgtaaagattataggccaggcacagtggctcatgcctgtaatcccagcactttgggaggctgagcctcgcagatcacctgaagtcagtagttcaagacccgtcttggcaacatggtgaaaccccatttctactaaaagtgttctaaaaattagttgggtatggtgacgcatgcctgtaatcccagctactcaggaggctggggcaagagaatcccttgaacacgggaggcggaggtttcagtgagccaagatagcaccactgcactccagcgacagagagagactctgtctcaaaaaaaaaaaaaaaaaaagattataattctgagatagaaaatctgaacaaccaatagtagggacattgagtaaattatatcagtttgatggatgactatagtaaaatagtaaaataataaatatggtgattgtataaaatatagaaaattaagtagaagagtagaacacaaaattatatacatactgtgattacaactgtgctgaaacactggaataaacagaaagtagatggtaagtttacattactttaaaaaatgtcctttacagtgtttaaagttgatttaataatctacaaaataaaatgaaagggtgaaatagatgattgctaaaggctttccagtctctaaaattctatgaaagttaatcatttgtatttgtaagcgtggaaagattcattattttcaacactgcagtgaaaaattctacctctacctagattctgcagggtttggaaaacaagtttatcagatcacacagtttactttaataataacaataataataacagctagagggaaggagaggttaatagtgataaataaaaccagcactgactgtccaggatgcatacttcattgttactgccataagatcctgaggctgctaaaacaaaaccaaaaaataattttttggcgtgtacatatattatctttaaaatttaaaattaaataaagattaatattaaaaagacaattagtattttgttttatcttttttttgagacggagtctggctctatcgcccaggctggagtgcagtggtgtgatcttggctcactgcaagctccacctcctgggttcacgccattctcctgcctcagcctcccgagtagctgggactacaggtgcccgccaccatgcccggctaatttttcgtattgttagtagagacggggtttcaccgtgttagccaggatggtctctatctcctgacctcgtgatccacccgcctcggcctcccaaagtgctgggattacatgcatgagccaccacgcccggcctgttttatctttttttgtgattttttgaggtattagtattacattttctatgacctctgcagttagtcttcatttcttttaggaaggattccatttttatgaaaaaacaatttcattgaaaccaaacagtagtgaaaagagtgatatttaaatatgagttggtaagtcgtttttgaatacacatatggtttaaaaatctaaaatctcttgacacttgattaaatagagagagggaggagaaggatggtcatagaaaatgaatcttgcccttgatgtgatgagtatggaatatttaagccaaaatctgtagtctcaaaggatttattgatgttttattgccagccagtcttcttccctgtttagaatgctatgtttttctgccaaacactgaggatacctaatagtttcctaagtgtttcttctgaataattaagtggattattttcagagatagactcttcttttaagtattctggggctttgtttttttcccttgttttctagcattttgacataggtgcatattatgtttttctttttcttttttagcaaatggggaaatgaaggcactgagaagataaataaacaagtttttgtgtgcgtgatttaaagagatagtctgaccattcatgtaaagtgttcagaacagtatctggccataataaatgttcaatcaacattagctataacaattattatcaaataagataaaatatgtgtagagtttgctatgcagtagaaatacaaagtgaggctgagtgtggtggctcacactggtgaaccactttgggaggccaaggtgggaggatagcttgagctcaggagttcaaggtcagcctgggcaacatagtgacacctcgtctctattaaattaattaattaattaattaattaaaaaataaataaatataaagtaagccacaaatgcaagtttgaattgtctagtaattacattcaaaaaagtaaagaaacaggcaaaattaacttaataatatagatatattttacccaatatacccaaagtaatatcatttcaacatgtaatcaatataaacattattaatgagatattttataggcttcttttcgtgctgtgttgtagcagtctgatgtgtattttaaactgatagcacatccaaatctgaatgcaaatttttcatcaaatgtctgtatttagatttcatgaaatgttcagttttcacatcaatttacatgctcaaattatttcaaacatacttcaaaaatttttccaataactaaatcaagtacctaaaataattttcctttaatatttgcatccacatggaaaaaactgattcatgttttttaaaagaatttcacttcgaagtgaaaaggctctcgcttttaaaactgcatctttccaagttaattcacgaactctcttgtcaattccatctcttgttctttactgtgccagccgtgatgcttctgctactccactcaattgtacatcagtaacgtgcctttgttttaaatcttaaaacgtagctgggtgcagtggctcacgcctgtaatcccagcactttgggagtctgaggtggtaggatcgcttgagcccaggagttcaagaccagcctggacaacatggtgagaccccgtctgtgacagagcaagatgctgtcttaaaaaaaaaaaaaaaaaaacttaaaatgtgtccatagctactttttaactagaaaataatttaattatgttaaaataactcaaacttgtgctgtctgtaaaacttcttcaaataaatacattaaaatattgcatcagtgcctagaaaaatatcaaagtgaataaatctgttggcaccaactagattagtgattacgtgtaatactagaaaagatgccacatgcttgacatgtgccctacacatacaatggttgaacaatgtagccctaccagagcaataaagctgtgtgtaatggggaaatatttcatactgcatcaatttcaaaatttaaatataattaaaatgaaacaaaatttaaaatttagtttctcagtctctctagccactttcagttgctcagaaacatgcagctggtggcaccatattggggtatagagacagtctgtcaaaagacagggtgaggagccaggcgaggtggctcatgcctgtagcaacagctacttgggaggctgaggtggagaatcactggaccctaaaagctggaggctgcactgagctatgatagtgccactgcactctagcctgggtgacagagtgagaccccgtctaggggaaaaaaaaaaaaaaagacatagtgaacagaacactttagtgccaccacgtgcacctttctgtgttagcatcagctttacagcagaggagggattgtaatgggcctggtctaattcccagttgctagctggttttccctttgttcttctctgcttctttttctgtcacaaatgcctggttctctgggcaaaaataaataaataagtatgtatttatgtatattaaaaatataactcctagcatggatttctgctagggtgcttctcactgatcatgcctccttgaatctactctgccaccatgattcgcgccccaacacctctcggcctgctttggatgaggagggccagctatgggcctacctcacagctcctcacctcagggtagggtgttctgaatagatccccacatcagacagagctgctagagaggcagaccccatctccctattgtctcataaacacacacactcactcacacactcacacacactcatactcactcacactcacatactcttcatccagctccatctgccgtaagtccgtttcacttcctctcagcttctaacattatctcatgaccatcctagtcttttccattgtgtcatgagtttctcccttttcttccctgtgccttcacgagaatcttgaatgagaaactgggagcggctgctgcatcagaaatagtaagttcctcacgtgaatcagaaatccactgtggaagaattttacagttctgtttttgtgctcttctgccggaatcagcttgaattttggaaagatgtggggacagaaccctgccctggcccagagagggaatggctgatccaaggggaggaggagttgcccacagagctggaacttgatgacttcggggcgcgggaggccccagaacaaagtgagactttgaagagagcagtgcttactctctgctcagttccagatctccgaggtggagccagttgaaatctgtgtaggaaacaaagctgcttttctggttcatctggaaagagagggctttttgttttttccccacgtgggcaaatagaggtggtgatgttgtgtttttagagccagaaggaaagttctgggctgcataatgcctatattccaggcaaatagaacccaacaaggaaaatggtctagctttatcactgactcactgcaaatcccttccctcctgtactttaatttattcattttctttttttaaatgacaaactgatattatttttaatttttaaatacttcagtgaccacaggacataatacttttttttttttttttttgagatagagtctcgctctgttgcccaggctggagtgcagtggcgtgatctcgtctcactgcaacctccgcctcctgggttcaagcaattctcctgtctcagcctcctgagtagctgggattacaggcgtgcgccaccacgcctggctaatttttatatttttagtggagatggggtttcgccatgttggtcaggctggtctcaaactcctgaccttgtgatctgccctcctcggcctcccaaagtgctgggattacagacgtgagccaccgcacctgaccttagtttttttctgacgtggtcctcttcttttatctctaagacttatgattgctaagacaacaaaagataccatcgttactggccaaccttggaatttggtcttgggaaatggaggcctgtagtttgtaacccataagaagagactgaaggggcctaagtgcagatgagaatccctggtgatagaacagacaagaactggagatcaatgccaatagtttgtgatgaacgtcttggggttcctgtgtgatcaacctgttgggatttctgtattagtttcacactcacctgtaatagtttaccaatggtgtttctgaaagatgaacatgaaattaagcgatctttcatgtttcctcgagggactttgattctaaaataactctgagaacagatcaggaaacatgatataaccctaaccatgcttgacacattttctctttaaataacagttatacttgaggagaggattttactcatgatgctgtgcaaaagccacatggattccactggtttggactttgccttagagtgggcgttgctaagtgatggataacagcagcgtgcttccctgagaggccactgtgagcctcttacttaggttgagaacttgacctcttacttaggttttataccaccataaaatgcacccatcttaagtggttagtttgatgagccatcgtttcttttaaggagttaacatttaaaatcaacttttaaaaattgtggtgaaataaatacacatgaaattttaccatcttaaacattcttaaatgtaacagttcagtgacattaagtatattcacattgttttgcaaccatcaccaccatccattcacagaactcttttcatcttgtaaaactgaaactctgtactatttagctgtaactccctcttccctttcctccagcattatcattctgctttctgtctctatgaatttgactactttgagtacatataagtggattcatgtagtattcatccttttgtgactggcttatttcacttagcttagtgtccttaggttcatcagtgttatagcatgtggcagaatttccttcctctgtaaggttgaataatattccactgtatatattccactgtatatatgtgtatacacacacacacacacacacacaccacattgtgtttatccatttatctgttgagggacacttgttttgcttccacttttggctattgtgagtaatgctgctgtgaacatggatgtgcaaacatttcttcgagttcctgcttcctgttcttttgggtatatgtatacctagaagtggaattgttggaccatatggtaattctatttttaatttgttgaggaaccaccatactgtttttacggtggctgtaccattttactttcttaccagcagtgtagaagggttcaagtttctccatatcttcaccaacatttgttgttttctgttgttctgttttgaatagtagccattctaatgggtatgagtggagttcagtgagtgttggcagatgtatatatccgggtacactaccccaatcaaggtaaagaacattttcatcaccccttgatgttgcctcatgctcctctacagttagtatcccttctgcctcaccagtgcccccaatcactggccccagacaaccacttttgcactttctagcactatatattagctttgttcgttctagcgtttcatgtaaatactttgtttggcttcatttagccagaataatgcttttgaggcttatctaaaaccctagtctaaaatcaattgtggatggaaaataaaccgcagtgtgactggagttcgatactatgctaatggttggttagagaataccatgggtctcagaaagaaagtgagaggaggagaggggggctgaggaagcaggagagggcccttcctagcaatgaggccttcaggaagcccaaagagccatagcaattaatgccagtcctatggcttcgggggcagccagttcaattaatcagcaggcatttcttgcaggcccgctatgtgcaaggcactgctaaaatttagaaacaggaaagtagaggcccaggatgagaatttggagagggaagatgctgccttagaattcatacaactggataatgcttttgtcagaggacagacacacacagaggaccttacggacttggtgaccaaaagaaccacaaaggaatctagtttgacttgttggtaaatgtgaaagcctgaactctatacgccacagatgtttttcatgtgggtagatttggtaaccccaccttaaacagctcactaaacaggtaatgctagaatactgtagatgtgataaagattacttggagagaacagtaatagaagaatagctaacatctgttgagtacacaatgtctgcaccattctaagtacttacgtgatgtaataacttgattaatttttgcagttgtcttataaaggaactattgttattaactctttgttacccatgaggaaactgaggcacaagagattataccttggcccaaatcacccagttagaaagtacctttaggaggattataaacccaggtggttgtgctccagggctccaaccactttgttatagaggaaggatggggtggtcattgaaggagaagtttccgtttatctgaatggcccatgatgtgaaattagcaactaggccaggaagttggctgcaccatagttagacctgtacttttcctttttttctcatcagaagggtggcatagatcacccatcctagggtgagcttgtgttgcccacagtgccagcaccttccagaccttgggtcagctgacagaacctaacatgttattaccaagcacactgcccagaaggcaaacccatcactcgcctgtagataggcctgtttcctagctataaagtggaggggtgggtctgatgcgctctaaagtcttttctaccctaacaatccaatctgggagaaatgcactctttctggggggcaagaatttcccctctatttctactcccattttctttgcatgcttatattgtagccttagaattactctctcatgtatggtttacttcacattttgatctgaaacagggaaaatcaaccttgagtgatcaaaagaagggttgtgcctttaagcctggaggggcgctgcctccaaaagcataagcaactgccatccagggctggaaaaaacatgttgcagctgtgccaactccatctgaggctttgaatgaaagcccataatgttttcagtttgtagcaaaagctagaagagctatttttggcattcctttctctactggtatatactggatagtcttaatattgctggtgctaaaataaacataaccagatggggtcattatatctaacctgtttcgacactggattcagataccccgaagtcatgatgcatcagtagtctctgaagcaggctgtactttgggaactttgctattgtggttggatcagccatgacctcccaacctaaacacaggatgctgggccctgttttaagggagggccacagaatgtgcttgggtggaatctttatgtcccttttagctggagatggcaaaactctgaccatgtgtctgcccaaagagacatattacagagccatgccacgttgttctcccaccagaaaggccgtatggctgaattagagcgtgtggggattagaaatgcgctgctttcttgaaatggccaccagccttgtactaaacatgtttgaccggggccatctgtctgcccgtcaaaagtgtggtccagtttccatcagataagtctggaagaggacggtttttgttgttgttttgttttttgcatccagcttgttaaaagatatgaagaacgagaaagttttagctcagcaagaaatgtaacaatttaaagtttttattctgtcatgattctaaaagcctctagaattgtcatctgccttttcacctaattatacgcatatgtacatactctttatatatatacactttgtatatattatgcatattatgtaaatatatacatatgtacacatatataatattcatataattatacacgtatacacatactatatagtatatgcgagtatatattatagcatgtattcagcatggtataatataaaggtctctaaagacaggcagacctatgaaaacatagctcttatcacctattactgagtgacctggggtactatgcttaacttctctaaaacttaaattatcatgtccagtccactggaaaataatagggcaaaatgatataatagtgacaaaacacataagcattcagtacaactagctcaataactacttattttaaaataaagtccctctggctctagaggatggaataaggaatacaaggccagctctcctgatggttacagctgcttagcagtggcaaagcctacctgtggaggagtgagcgcagggccagagagaggatgactggaagctgggagaggaccattgagaaaggtcgtaaagtctttacagcaggaagttcaaccacgtcatctctgtagcttccaggatttttttaaatggcaggttactcttaaacctacaaggcataggggatcatatactgtcatgaaaggtatacaggcggaaaggaaagtgtgccgtttagtaaatcaaatggtacctgacatggggcaggcattcagataatgtgtgttgaatgagtaggtgaatgaacatgaaacatcagtaaaactgtcctgtaagtcccatgatagaaataatcagcattactaccacatcagcttcttgtttctcaggtcactggactgaggggagggaaatccaaataatttgtctgcaattaaaaggcagaaggtcaggtgcagtggctcatgcctgtaatcccagcactttgggaggtggaggcaggctgaccacttgagcccaagagttcaggcccagcctgagcaacatagtgagaccccatctcaaaagaaaagttaaaaaacaaaaaacaaaaaaaaacctccaccaacaaaaaaccagccaactgaaattccaaaggtctctagtccacaggtggcactaggggtcactcagaaaataaaaattaaaaagaaaattacttaggaaagtctaaagcactatattgggtacttcattatatctgaagcaagttgatgatggtgcccagaaaaacaaggtagggaagctgcacatttataaagcgtattagaatattctttgatttatgcactattcgaagcttgagcctgggaactaaggccatacaacaaagcaaggattaaactatcaacatgtgggacccagtcagctttcccagcaatcattgaggccactgtgactttccttattgttataaaatgtagatatttagccctacctcttaagacaagatagaactcaccacaaccagttttcactactgtagtatctagtggctttcaaatcaggtaaactaggtgttttatcccagtctggcctcatgctaacttcaggcaaattacacaacttttctcagtttttaacttgttaagtggaaataatagtcattgtcccagaggttattgagtagataagataacatggaggagtgtttaataagtgttccctccctccttcccctgccttttagacaaagcaatcattggagtaaaaactggctttggcatgatgtgggaagagcagagaaggcgtgggatgttttaaattatatgtaaaatacatttttttatttttttgagacggagtctccctctgtcacccaggctggagtgcagtggcgtgatctcggctcactgcagcctctgcctccaggttccagcgattctcctgcctcagactcccgggtagctgggattacaggcacgtgccaccacacccagctaatttttgtatttttagtagagatggggtttcctcatgttggccaggctggtctcaaactcctgacctcaggtgatctgcccacctcagcctcccaaagtgctgggtttacaggtgtgagccactgcaccaggcctaagatacatgttttttaattacttgtggattgaaaggattattattgccctcaacagtgctgtgaataactggccaaaatatggacaaaagaccgtccgtaagttactagctgggtgctaggctggaatcgattcttatttaagatggcctagtaggcaggcctccaaatttgttttcattcctttaccttctacatcttgcctttgaatacacgtttaaaatgttatttctcccaactcaaaccccgtcactgcaataaaacttcctttacttttagaaggatctaagttccaagaaaaaaagaaggaaaaaaagagagttactctcattttcctatttcatagacagttttgaaagcctttagtgtttgggtggggcccagtcacaccctttgcaatctgcagaccagtggtttaaatttgtcatccttgtgggctgtaaaatgaaaccatgtaccaaagaaaaatagtgaatgactcactcacatgtgatcttccagcgaagggaaggattcagtaggaatgtgccacaaggctggcaggtcccttcataataggctcaggtggcctgttctgggatgtgggtcaatgttaggaacctgaatggaggccgccaagttgtggtggggtctgaaggagagcttcagttaccggggtgaattcaccacaatgcaacatccagcagacccagagaaactctctctcagcacgacaagaaagggaggattcctattcaccaggctcattaaacctgtacgcacacacacatgcaaacacacacgtgcagacacacacacgtgcagacacacacatattgctaatttatttatattaagaaatacagtgccaggcatggtggttcacacctgtaatcccagcacgttgggagggtgaggcagacgatcgcttgagcctaggcattcaaggccagcctaggcaatgcagcgaggccttgtctagaaaatttaaaaaaaaaaaaaattagctgggcgtggtggcacgtacctgtagttccagctactcgggaggctgaggcggcaggatctcttgagctaagtagttcgaggctgaagtgagctatgactgtaccactgcactccagcctgggcaacagggcaagaccctgtctccaaaaaaaaaaaaaagaaaaaaaaaaaaaaaagaaaggaaaaatattatttaggcaaaaatcctcatgctccaatatttgtagacaggttgatttgggaagccaaactctagcctaaaaggtgcttggcaaccatggaacaagggagtattagatggacagaattcatcttcacagtggggaaatatctgacccccgaccactggcttcaccctttccgtaggacagggcttagatgaatatttcaaagtaagcatctgtgccagttttgcatggagcttgctctgctgatggacacaagttttccttaaacatgctaatatcttccagcaagcctgcttcaacccaggagccgttctttcccattaaaatgagtttgcatatctttgttttgatgggtgtttgctgattttactagtctaatgcttagggaagtatctactttgcccgctttccaaatgctgggtgagagaggagaatgcaccacactgttacctccacatatagcctactaaataggacttgaaatcagaagttcttgttccacatccctgcagtctgccataaggacataagaaactttctagttgagtcagcacctggcttgcccatttctggcagatacaactgggcaatttgtgttacagtgtattattatccttctggacatcctggaaaccagtatagatgtattctcaacatacctactttttctttatgaattcattgtaaattatttccatgaatttatgtaatcttagttgaaataagttgaacttatttacaacttatttttcccttttgtaactgctattgagataggtctcatatgtttaattcccaactatctttcagttgctccaaaactatgtcttaaaaacttcagatccctatcctaagccctagtcgtagagttcagatactgttaagaagctgtagtcacccacccatgttcttcataaccctaggtttttaagacatcactaaaaagtgtatcaccttcagccttcatctttccatctggaacagtcctgatgcttttagagttatttgaatcacccccaaaatgggagcgtgtttgcattttacagatgtaaaaactgaggcatagttgctaattatttcgccccatctgtgagcagcaaaggagcttttaaacccccaacacagtctgagtcattgtggacttggtcacaatgtgcagcttatggattgtagaaagggcttcagagagaaagaacaaaggaatcaaggaaggtgagatagcaaagaatgtcgggcagaggctctgctaagagcatggcactgcgaggcaggtggaaaatgaggtgggaaggttataggtggaacttccagaagaaaggcttttcagcccttgggagctgtcattctgtgcagctaagagaggccttagcaattgctaagagaggctgtagcaattgtgttttggggggtgcatttctttcctctttctgctccccccatccttgtgccaagagttattgaggccttaccaggtgccaggctctatgctaataagcatttgtgtagactgactttacacatactatctgatataacaatgaatcgaggagtaccattttctgcatttatttgtatattctatttagaaatctgtttggtggccaggcgcagtggctcacacctgtaatcccagcactttgggaggccgaggcgggcagatcatgaggtcaggagatcaagaccatcctggcaaacatggtgaaaccctgtctctactaaaaatacaaaaattagctgggcatggtggcaggcgtctgtgatccaagctacttgggaggctgaggcaggagaatcacttgaacccgggaggcggaggttgcagtgagccgagatcatgccactgcactccagcctggcaacagagcgagactgtctcaaaaaaaaaagaaagaaagaaagaaagaaatttgttttgtactagtaaaactttaataaataaacaacagctgtctgtatataaatgtgtatattacactgtgtgctgtccaagtttcaaaataaattgaataaaagtacccagtgttcaagtatgataccttctttttccttaagtgaaatatttctagctccttgtgtaatgactctcagtatttccagaaggctttgctcaagatgtctttccacttcttgatgtggtaaaaaggagtggaatgttcatattaaagcttgcctcttttggagaggtgtcccccttccctgcctcctcacttgtcatttattccaaaactacatgaaagcaaagggaaggcccttgctctgaaaagcagtatctgccagggttgtcagccaattagcatatgaatcatacttaccaagggatatgggtacatgtggatcattcacatgacatgaaacagggcctccagaccaaggactggctaagatctgtgaaggtcttaagttttgcccctgattttttgtttgtttgtttgtttatcaatatttgttttattctcctttcttttcttttcttttctttccttcttttttttttttttttttttttttgttttcgacagagtcttgctctgtcacccaggctagagtgcagtggcgtgatctcagctcactgcaacctctgcctcctgggttcaagcaattctacttcctcagcctcccgagtatctgggattacaggcgtgcaccaccacgcctggctaatttttgtatttttagtagagacggggtttcaccatattggtcaggctggtcttgaactcctgacctcgtgattcgcctgcctcggcctcccaaagtgctgggattacaggcatgagtcaccgcgcccgtcctcaagcaattcttgtacctcagcctccctagtagctgggattacaggcatgccaggctaattttgctatttttagtagaggcagggtttcaccgtgttggccaggctggtctcgaactcctgacctcaggtgatctgcccgcccctgcctcccacaatgctgggattacaggcgtgagccatctcaccctgccctatgtgttaataaccatttaaaaatttccaccctgctaagactagtccgtgactctctgtgcctttctccattcttctcttaactaacctcatgtttttattagcatctgtaagacccataaggggaaactgagagagaaaattcaataagactcccttggttttgcagcagtaaggttatatgaggtgtttatgtaaaaggagccccccccccccctttttttttttttttgagacagagtttcgctcttgttgcccaggttggagagcagtggcgcaatctcagctcactgcaacctccgcctcccaggttcaagtgattcttctgcctcagccttccgagtagctgggattacaggcacccgccaccatgcctgactaattgtttgtatatttagtagagacggggtttcatcaggttggccaggctggtctcaaactcctgacctcaggtagtccacccacctcggcctcccaaagtgcagagattacaggcgtgagccaccgcgtccagccaaaaggagcccccttaatcacagcgtttaccatgacctgggtaacaggcatattcagcagacaaataccccgatgatcatcaagccagtcctctgtggtttgcatatgaagcacatcagctgcttcatcaggggtattctacttggcatttataaggggagaggaacagtcccccttctcagggtaaacagaccttagtgtggcttttgtccagtccaccaggctggatgttctctcaggaataacctcctatgtgtctggaccacctgaaacatctgcgattgctccatagagagctgtgggtcctgcatcaacccaaacatgaatgctagcattttgaatactctgcagtgttcgaaacctaagacactgtcactcacttagttactcacacaacccatttgaataaaggttcttcaggaagtttatgatactgatctacaaaatgaaataacttcttcacactataccctgtggtttcaatcgtttcatggtttgccttccaccccacataaactgccttcttggttaccagagttcttagtgatattgtctaatctcagcatgattttgccattggtgggtggctttgcagttactggctagagcgcagactcactgaaatctgagcttggtctgacccagcactctcttttaattttattttatctgttacagataataaccaagggactgaatatatcgccttttcttattagtttgcatttccttatgcttccagtgagccaacaccttggggtagcttttacctttactaacagatctcagcatggtatgctactccgtaccatgagtggctgttaccaatgccatgggttcttgtaatcacccaggatagaaatcaagagcaatcaccatacatagcagcaaagagaaagtttgttttggctcatgcacaagggagccagtgctgagaaaggaaaagaaacagactgctatcggaggatagtgtgtgggttagttttatagggtctttccatgggaaagggttacatcagagcatgtataggagaggcttttctagcactcatgcttcttcatgcatcatatgcaacattagtattttaaatctccaccccatgcatttttagccttaaaatgaggaagggtaactgtaggttggactttaagtctagctatgcatgcagggctccagggaagtccccagccccctgaaataggaactcgtggttaataagcttcttgggtcttttgttattaattggctgagagttagataagttaaagcttgagtgaatggcttctatcattttcttccaggccattttatttatttttattttatttatttatttatttatttatttattgagacagagtctcactctgttgcccaggctggagtgcagtggtgcaatcttggttcactgcagcctccacttctgggggttcacatgattctcctgcctcagcctcctgagtagctgggattacaggcactcaccaccatgcccagcttaatttttatatttttattagagatagggtttcaccatgttggccaggctgatctcaaactcctgacctcaggtgatctacccacctcagcctcccaaagtgctggaattacaggcgtgagccaccatgcctggcccagaccatttaaaaatagggaacccaccagcctgcctatctcatgaccatgtggccacccaggaatcaaagtttctcatccccaacccttttgttctttctcttcccaaaccacatatttctgcaagccagggccattctagcaaatcccacttctgacaccaattgtataggaaaacaaactatttttccttatactttaacactttttcacttctagcaccagatgtgatgggtgagggggtggggtgggggttcccacatcaagcatcaagcagttcttcagttctctttggacaccaactgggtgtgccacaatttaactaaattctgacactatcaagttagcacagaccccactggttaaggcaggggtgtccaatctttcggcttccctgggccacattggaagaagaataattgtcttggaccacacataaaatacactaacactaacaatagctcatgagaaaaaaaaattgcaaaaaatctcataatgttttaataaagtttatgaatttgtgttgagccagattcaaagctgtcctgggccacatgtggcccacgagccacaggttggacaagcttgggttaagggatcagtcccacagtcctccaccacttcagatgccagtgtcaagtccagcttgtcacctgtgcttctgatggaatggctagaaatcagaggttcccatgaccccctgttgactttcatcatttgctagaatggctcacaggactcaggaaaacagtttacttactggattatcagtttatgataaagagctacagatcaggaacagccaaatggaagaatgcatagggtggggcacgtggggaggggctcacagcttccacggcctctccaggcgcacgtcttcccagcacctccatatgttcactaacctggaagctcttcaacccctccactccctatttcccactgtcctttgggtttttatggagtctttgttacataggcatgattgatccaatcattggccattggtgatgaaatcaatctccagcccttctctcctcccctgaggtgagaggttgggctgaaaattccaactctttaatcacagagtttgtttaccagggcaaccagccccccatcctatagttatctgggggctttccagacgtcccctcattaacatgaactcaggtgcggttaaccgggcttgttatgaataacaaaagatgctcctttcacccttattgttcttatcgcttacaaaattccaagggatttaggagttatgtaccaggaacaggaggagaacaggtgtatatcccttactctaagtcacaatattatatggcctgactgcatcttcatctcatgccactcttgcccttgttcacaatgcttttgtccatccttcaaacacagtaagccaatttctgctgcagggcctttgcactgactgctccagctacctgaaagagttctccttcagaattttgaacggctagccccttcccttcattcaggtcttagttcagatgtcaactcagagatgccttccggatcgccctgcccaggccagcttcttcctggtaacctgatcctgtcatcctccatgtcaggggtcagcaaatgttttctgtgaagggccagataataaatattcttagcttcctgggccacatggtctctgtcacaactactcatttctgctgttgtagcttgaaagtagccacagacaaaatataaacaaacacgtgtgactgttccaataagtcttcgaagtttgaattttgtacaattttcacatgtaataaaatatcccttatttgattttctggtcaattatttaaaaatataaagacattcttggcttgtaggttgtacaaaagcaggatttcacccatgagctactgtggtttgccgacccttgctctgtgctatcatcctgttatattttcatcatctcgccgaaatcagaaattatcttatttattcgttctaaaatttgttgttggtggcaaagaggttgaatagaagttataagtaagagttaaaaatatattttaaaattgtcaaagggttttagcagcctatgctgggcctgttaatatcagaactaattagagttagccaagttacaatgcatctctacagtggatatcaatactgtcaccaagtcaactgtctctggagtcagaaaaggcctggttgatgtatatctggcatttagaaagtaaagttgggctgggcgcggtggttcacgcctgtaatcccaacactttgggaggccgaggcgggcagatcacctgacgtcgggagttcgagaccagcctgaccaacatggagaaaccctgtctctactaaaaatacaaaattagccaggcatggcggcacatgcttgtaatcccagctactcgggaggctgaggcaggcgaatcacttgaacccgggaggcggaggttgcagtgagccaagatcgtgccattgcactccagcctgggcaacgagagtgaaactctgtctcaaaaaaaaaaaaaaaaaaaaaaaaaaaagagaaatcagagggccaggtgtgatggctcatgcctgtagtcccagcactttgggaggctgaggtgggcagatcacttgaggtcagaagttcaagaccagcctggccaatatggtgaaatcctgtctgtactaaaaatacaaaaattagccgggtatggtgatacatgcctgtaatccatctgtaatccatctaccagggaggctgagacagaagactcgcttgaacctgggaggcagaggttgcagtgagccaagattgcaccgctgcactctagcctgggcaacagagcaacactctgcctcaaaaaaaaaaaaaaaaaaaaaaaaaaggaaagagaagtcagaatgaatccttttttttttaatgaaataaggggagccaagtaatgatttatattgtggaaagagcttgaaaattatgtttgtaaaagctatttgtcaaaagataaagatgtctagttatgtaaaaaataaaataaaataaataaatgtgtcgtctatctctcctggtagactataaatgccttgacagcaggttcattgtcttatccactgcattatctctatcagtgcctggagaggtgctgtgagaggtcatgtaggaacatttggtgattgaatgagtaaatctacacagtccatgagtcactacttctgataaagtcttccttccagacatcccccatatatcatattccagtgccacaccctgcccaagcttttgcctctacccatctgttcctgtagctgtctctcaagccttcttaactccttctctctcactccagtctctctctttccagtttaccctatagtaaagtacagtaccttgttaaagcttttcttttattatggcatttgtctgcaaataacaaaaaactttccacagtattcccatgacctatggtattctgtagccagactcctcagccggccgtgcaaggcccataccattcagttcactttggcttttccaaccttgtttctgagccttccctggaatgagccctctgctgtcactcccgcatttcctcattattcctgaaactgcagctcattcccacctctgtacctttgctcagggtgtgtcccaggactagttggttctccccttagttgaacccccaggtaatagggggtaagtcggcaatgaatgatgggaaacaggaagaatgaaactggaaggtaaaaagcaaatgtgatcaaacaaggcctaaatggtaatcaggtgggttaagaaggacttagttatcatcaaaaggcacactgcttggtcagattatctagaccagtgcttttcaaactactgtgcaggcaaatgtttggggaatcttgtaaaaatgcagattctgggagtaggtgtggggtagggacctgagattctgctttttttctatctctctcttttgagacagtgtctcactctgtcacccagactggagtgcagtggcatgatcttggctcgctgcaacctccacctcccaggctcaagtgattctcctgcctcagcctcccaagtatctggaattacaggcgtgtgccactaccccccagctaatttttatatttttagtagagatggggtttcaccatgtgggccaggctggtctcaaactcctgacctcaaatgatccacctgcctcagcctcctaaagtgctgggattacaggcgtgagccaccacgcccagccaggttctgcatttttaacaagttcccaggaatgcatgtactcctggttctaggatgactctttgagtatcaaggatctaactaaactctgagaagaggagccttatccaggtggttcgcacctgtagtcccagtgactcgggaggctgaggcaggaggatcgcttgagtccaggagttcgaggctgcagagggctatgattgcaccactgcactccagcctggacaatggagggagaccctgactcaaaaaaacaagaaaagagaaggtgccttgtttatatgacttagatatgggaataggaggtggtgggctgccattaggggactgtttatgtgtcatgagaactccacaagagtcctagactacagtgaagacatttcttgcattctgaacaactgaaaaaaatgtgtgatgatgatgaaagagggggtgctgaaaaccgaggacaaagttgagtgtataagcctgcagcttaaagggaagaaaatctttaatcctagaatggtggcggtgaaaatcgccactgggaaacgaaaagattctaatgttggttgggctgccggcctgtcattacacacacacaaacacactcacacagatgcacacacagaggggaggctggtatgctgtactttcctctgatgcagttggattatctcttttctcaaagggggaacctcttctgatctgctgtaacattcagttcagaatctgtgtccagcttgagtacaagtattggtacttaacctaacaaaacaataggaatcctttctgtagtgtgtatctccaaacagaagaacaggtgggaaaatattttaccagtgtgataaagttgactttttttaacagtttctctaattagcccattccttgtatctttggctaatcagtaactggccttttgattaagttgggtgtcatttcctcatggcttagcttcatgcaaactgcaagttatcctgattaatgattttaatgccatttccttcatcacagtaatttcccctctgcttttatcacagaagaacttctgcttgggtggctgaactctgatcttgacctagagtcatggccatggtaagttgtgaaatacctcaaccctatctggtgccagctgccaacaggtacagaatgtgggctcagcaactgttagcttaaacaaagcattgtttactcaacagaggggaaggaggaggacatgaaaaggcaggtctatttctaaacatcatttaaatttcttttaggggtggtaagcaacttgaccttgaaaactgattcaaagagagaattctttgaattcttttaacatcctgagaatatagaaacaagttgtaattttctgtctgcagaagcgctacatgtttattttagaacatttaaaaaggaaaaactaaaaattctttaggttctaccacctgaagaggactgctatcgatactctgaggtagccacatcatttcaggctcatcaagaggggtgtttcttaacaatatgggtgtgttggctgcctcctgctttagacagtaatcagacaccttggaccttggttatttgctctttggaacaagcatcgaattgaatccctttgagagttctgtaaagttcagctctgaggtggaagctgagcctcttagctgaaaacatggctgtacctaaggctggacatctgctctccttctcttgcccaaatacggtttctgaatagacaagtaattctgatccgtggtcttctggaggaagcaataatagaagtagaaatcttatacctagagaggaactggagagcctgacagcttgagatgccttcctttaggaagatgggtgtgtaaagtaaactatcctgaacaaagagtaatatactcttaatttcttttgcattagatattccagaattttcttcatgatctctgacagtcaaaggcttattcatgtgtgccccaaatctctcatgctttagtttaaaatcattttcttgctgattgattctccctggccatggagaatttttttaaaaatatttacgtatttttattttttatagagatgaggggctcgctatgttgcccaagctggtctcaaactcctggcctcaagcgatcctcccaccttggcctcccaaagttctgggattacaggcatgagccactgtgcctagccaacgtggagaatatttattcagaaatgcttatggtgcccctactttgtggcagatgtgggactaggactcagaattaatgagatgctcttcctgtcttcagcaggctcacagctttcctacaaatgaagactgtaatcaagtggccctttgtgtgctttccactcggagaaaattacctcagttgctctcatctttcctcctaaaacctgtttttctatcatgactattatttattgacagataaaggacattttaaaaagaaaatcacactatacagtcgcaacattggaaacaccaactatttgccattttttaattttagaccttactcatatgtataatgatttttaaataagagtaataagagcataaataatagttttgtagctttccttgtaccccacttagtataggaaaataggaaacaagttattcactctgatcttatgctttatctcttctctatgctaatgagataatgtaatgtttatattacatttcatatcattaaaattatttactctagtggttatgagtgttttaattttcttcttaatttatttttatttttattttttttgagacagagtctcaatctgttgcccaggctggagagcagtggcgcgatcttggctcactaccacctccgtcgtaggtttaagcggttcccctgcctcagcctcctgagtagctgggattacaggcgctcgccaccacgcctgactaattttttgtatttttggtagagacagggtttcactgtgttggccaggctggtctcgaactcctgacctcatgatctgcccgcctcggcctcccaaagtgctgggattacgggcgtgagccaccgcgcccagctttcttcttaatttttaaaaaattttccaaattctctataatattttttaaatcattgtattcaagattttaaaacatgttttatggaggtataattggcatatagtgaaatgcacatcctttaaggttactggtcgttaagttttgacaaatacatatatatacccacataacctactctcatatcaaggtaggacattttatcattcctagaagctcctccatgcccgtttcatattaactccccttcccaccctccactccacacaagaaatgcaactgctgttctgagtgttatcataagttagttttgcctgttctagaacatcctatatattgaatcatagagtaggtactcttttgtgtctgacttctttttctgggcattatattcttttgcaattcatccgtattgttgcatcagtagttttgttcctccattcctttttattgttcattagtattccattgtattgtactctgatctttttggcatgtatcttcttcattattaatgtaataacaatatttcatcaattgtgatatggcacctatttctatctattcatttttgtcattccttcctatatcctctctgtttcctttgcctgctatcacaatgggccctcttgggacagaattccctgtcttcccagaatggataatggcctattatactctgaaattcaatcaatatggatatttatcatgctaacagggaacacatttcttgatctctttcttggagaaaaagagtcattaagaatgctaactgataaacggaaccacccttgccaattcctctatcgattcaccttgttatatattaatcctaatccatagtagtgtcccacagcaacgcagtttgcttaaaagttgaatgcagtgtttgagtgccatccaaaaatttttcaatacggaatttccaaaagaaccttgtgaaacattcaactcagaaagctgtctcatgctggggccaacagccatgttggaattctgacagcaagtcaccaatttgcgtattactactgatatataatagaagaaaagaagtaaagtgcctctgttagtttcttgaggctgccaaaataaagtatttgcaaaagtaattgcaccaacctaatagcacaaactggatggcttagaatagtagaaatgtattgcctcacagttctggaggccagaaatccaaagcaaggtgtcagcagagccatgctccctttgacacctgtgcagaagccttctgggcctcttcctagcttctgggggtttgctggcaatcctagctattccttggcttgctgctgcataacttccatctctgcctttgtcatacggtgctcaccccttgtatgtctctgtcttctcatatccacatcttcttataaggacaccagtcgtattggattaggggcccaccctacaccagtatcacctcatcttaactgattaatctgcagtggccctatttccaaataaggtcacattctgaggtgctggaggttaggacttcaacatgtcttttttgaggggggagatacaattcatccaataacggggcccaaggaagtcgatgtcatacatgtctaccttcctctgtcagacatatagagggtgatgaccaagtgccaaatgcttaccatatccagaacatgaaagcctggtcttgcagcagagaaggcccgtgccctgggtacctgaggacttggatgggcttgatgtgggccactatgggcctgagaggtccaggccagggtggtctagtgcagtaagctcaagtcaggctcaccagagaactgtgctaagggtataaaaatcctccattcctttagatggcccatattacattcttggatccaattagattatcagaaaactttagctctattccacactgtttatgccaccttgtacaaatgctccatcctagattctgctttggcattaccccataggcttgtgtggaggtataatacaagaaatagataaaagaatctcattattttatttattatggaggtacagctgaagttctctttgatgatgatgatgatgatgatgatgatgtttctgagtttttgttttagtgtttacttttttctgggttttgtgctaagtgcattcctgtattatcctgtttctgtgagttattattcgcaacatacaagtgagaaaaatgaaacgtccccaggtcacacagctagaaagaggtaaagataagattcataccccactccagtgcttatgctccttcccactaagcttcttagaccaagcgccaactactccctccttcctcagcctctggacagtgctcgatcctggatttcctatgagctcaaggaccaccccttctcagccatcctttctgggctctccccttttggacctgtactgttggagagacccaggcttatcctaagtccctgttccctattttcactttctttccaggtcatttcatcaagtaccacccaaatgctgatgcatcccgactttattatactggatgtgacctctagacttataccgtataaccaattgtctttttgacaattccacttggatatttaatggacatcccaaacttaacatttccaacatagaacgtctaaatcccactccacactgccactctgaatctggtagtcttcctccagttttctccatctgggtaaatgatacccagctgctcaggggaaaagatttagagttatacttgattcttttctttcctcacctcccacgtcagtccatcagcaagttctgtcgcctttgctccaaaacatgtgctgagctgtctgttcctctgtttatttccatcttaactatttcaccctagtctagctcatatcccacccccagatcttggcccaggctctcaaatggtctctgcatctctctacagcagcccagggggatcttttaaatagataagtcagatcacatgtccctatctcctttctcaaaacctgtcggtggctttctactgtacttagaataaaatacaaactccttacctggtttgaagggctgccttgctctggccccagcccacccctctgatttccttcttttttatttttaattcatttatttaaatatttttattatggaaaactttaaacatatacaaaagtaaacagaatactataaggaacccctttgtgtacctatcaataattattaactcatggtcactcctgttttttgtctttgtttttttgagacagggtctcactctgtcgcccagattggagcacagtggtatgatctcggctcactgcagtctccacctcctgggctcaagagatcctcccacctcagcttcctgagtagctgggactacaggcctgtgccaccatgtgtagctaatttttttgtatgtttttgtagagatgaggtttcaccatgttgcccagtctggtctcaaactcctgggctcaagagatctgcctgcctcagcctcccaaagtgctgggattactggggtgagccaccacatccggcctgtttcttctttatatccacttcctcccctttctctccacctgtgtgattttgaagcaaacccaagacatctcatttcatctgtaaactatttcaatagattaaacctcttttaaaaatgaaatatcaccataatgccattcttatacctaaaaatgttaaaaccaagtcgttagtgtcatcaaatgtcaagtcaatgttcaaatttccatcgtctcataaatgtcttttgctttttactgtttaatttaggatccaaattatggtactacaggttcacattatgatcattgatgttccttttcatatcttttaaactgtagttcccttccatctctctctctttaaattctccttgcaatttatttgtcgaagaaactagatcgttttttaagtgctgtgtctgagagtctggattttgctgactgcaaccctttggtgtggtttaacattctcctttctcctgtttactggaaatttgtttttggctctagaggcttgactggattcaggtttgatatttttcccttttggggagaacagggttccacgttggtgtagtttgtcttccccccactccttgcccaccaacttgagccacactggcctctgtcctgctttccctacaaactagttccggcctcaggacctttgcaggagctgtttcctctgcctgtaacccttgcctccatctttgcatgagcagctgcttcatttcattcagctcttaacctcaatgtcactcctcagaatgggtcctgcaggacctctctatctgcttcacagcaatgctcacccctaggcactttatggaattgtgaattgttggcttgtttactgtctgcctcccatgagctagagcatcagtcccggggagcaagagcttaatttttcatggtcactactgtacccctagcacctagaataccatctaggctatggtcagtgctcaacaaatgtttgccgaatgagatgcctccgtgttggtgagaggctgcctctcagtaacatcactctcttgtgtgctcaggcaaccaaaggaggtactgtcaaagctgcttcaggattcaatgccatggaagatgcccagaccctgaggaaggccatgaaagggctcggtatgtgtcctgctggaagtgaatcctcctgcgtgcattgcacatcacagggtcacacaggagggtgccatgtctgctggccatcacgtgggtcttcctttaataaaacacaagggaggctgggtgtggggctcatgcctgtcatctcagcactttgggaggctgaggtgggcagatcacttgaggccacaagttcgagacaagcctggccaacatgacaagaccccatctagactaaaaataaaaaaattagccaagcgtggtggcacacacctgtaatcccagctacttgggaggctgaggcaggagaatcacttgaacccaggaggtggaggttgcagtgagctgagatctcgccatggcactccagcctgggagacagagtgagactccatctcaaaaaagaaagaaagaggctgggcacggtggctcacgcctgtaatcccagcactttgggaggctgaggcgggtggatcacgaggtcaggagatcgagaccatcctggctaacacggtgaaaccccgtctctactaaaaatacaaaaaaattagctgggcgtggtggcgggcgcctgtagtcccagctactcaggaggctgaggcaggagaatggcgtgaacccgggaggtggagcttgcagtgagctgagattgcaccactgcactccaggctgggcgacagagcgagactccatctcaaaaaaaaaaaaaaaaagaaagagggaaagaagggaagaaggaaggaaagaaggaggagagggagggagggagggaaagaaaacacatggaacaagttgagataagttgggacaaactggatggggaggggcattagttcttcactttaataaagaatgataaatttaatatactcattatggatttcccctattgtttaaacctgctttgaattacgacatcatgaatctgcatattaaattttagaaatgtatttgttttccaattagtgctggtgtgtatatggtgccacagatttacaaagcagtttcacagacattatctcattggatatatgcaacaacctgtgatttagtgaaagcagctattcctattgttattttagccccattttacagatgtgaaactgagacccagagaggccgagtaactctcaccaagtcgcacagtgagtgaaactgagccatggctcacactaggcagatcccatctcaagctcggggtcatcagcactaagtccacattcttgccttgagtccgtctgcttgttgctgtggtgatagacacagctgtgacagcaccgacatgcaatgtgtggaatttaatgtgagaaggctggtgaagcagccttgttgtctggggtaaatactaaggtttttggtgtcatggccaaggagattgaggttgcagacagacacacacacagtgagtttggagcaggagtttaataggcaaaagaaaagaacagctctccatcacagagaggggtcccgagcgggttgccaagtggtagtaaaattgtcagggtttttataaatgggctactgaggagggggctcatgagcagaggaggtcttatcctcctagggtccagtggtttggttgggaccaggtgtgccttctatatagagcagagtttttttaaatcagctcttatcccattctctgaccacatagatggactcttattctgtgtttctttgtcttgcttatctgggagggagagtttctgtgtctgttcccacacatcttcttgcagctgcagacatccacccaagtctgtttttagctcctcaatcttactgcgcctaaagggaaggaatatgcttattaagacccactgttttactggggcccactgtgtaaatgtgaagtttggtgattacccaggagacttccccctccctttctgtgctcaagccatcttctctgtgttttacagcctgaactttcaggctgcttgttgttagaagagaagtgctttttttttgaactgcatgaggttagaaagggagctatttttgagctgctttttgttaaaaggaaagttttctgctggggactcactttaccctaaatgtctacctaaatcatttctttctgcctcctataacatatttcccccctcaggaatgaaatccataactgctgctaggggaaactgggtgacgatttcttctggctacttcctgctggagagtggcgttgtgtggggaacagcagctagggctcctcctggggttgatttaagggtccctcgtaggagggcagtttcattttcggctccattttcagcaccatctgaagcttgatggtttctaagcgagaagagataaacttcacaaggaggtttagaatataggttctaaatatgagtattaagattactattattaatgggggcactataggccgtaaccatgacaacagagtttgtttgatacctgtgagccattcagatgggttgtgctgctgtaagtgggtatatggggcttggctttgtttagcttccttggtcttactttcccaaaaaagggagaaaccctggggttctagtttacctggcaggatttgtaggataattgcccagaactagaacatgtttccagatttttctattaccgatgcctttctgttttctctgagctgcagccagagattcctggttggttgacaggagtaagcagggttagtttaaaatgtaggcaagaacttaaaaacaactgatgggactacaggttaataacagatgtatgataagtcttaaaacataatttctctttctctagtcctcatttttgttaaaaataatctatgataggactgagttgtttgcaaaacagacttcagtcctatacttggcctaattatttgcataaagtacagcaagaataatcatccttacataagcctcttagattggctttgatggaaccttgttccatgaggaattttagataggactttttaaagccaagcccagccataggtttgtacttttaaatacctgtgagttggataaatttttttccttcttgaggttccagaagcatggggttcctaggcctgttagaaagtgacattctttactcactgcaggtcaggaaccctgtatggagactgtgtagacagatatgaggccagttttccccaggggcttttattggctcagcaagttaagcttgattccttaaagggaaatatacccttctagtcaaagccttggtaaaacaaccagtttttccaattgtgttttgttgcaagagaaaatggattcttgctgcactgattcaaacaactatattgttgtaatttaagaatatttataactagtttccaaattctacaggaattaggcagagagacataaacatgctccaaactttgcctatagtagtacactttgcttagttatcaaaggctgtagctagcttaagacaagtttttttgactctaaaaaataaaataaggattagccgtgttctaagaataagtgaagaatattgctttagttttctattagttcagttcattccattaacttttgttttgatatttataaacattttagccttttatgagtcccatacattttttggtcatgacaaacctgcattggagagaacttgttaaagtcccatggcttgattatgaaccatcttttgaagagaattaaaacaaaacaacaattgtctgtaaatgacaaaatgtccagtttggatacagtcagaaatacaattgacaaagaaatttggttatttttgtgtttttcaaaaacccagcataacaaccttaattgtaatagcacatattcagacactagaaccatagacatcccatacagttttggaacacatgttaatattattccctaaagtataacctgaagagtattagacatcattttggcaattttatgtacctcaacatgttaaataatactgtttacctctcttctagatgcttcaggggtcctctgcagcacccaaaagccaggggttaggaaagacagacttgagactaaagtttgactttgggaagcctgttaagtatatttaaaatttaaaacacttgatattatgaaatagaattttagattaccaaaagtttttgtttttgccaaaatgttgagccagaaatttgaaaaagcaaaaaccattcattagccttttctattccatgaaaatcccgtgttaagagagaaagttaaattttacccttgcattagtttgctattaatgttaaacttaattttaaatgaaacattatagacaatcctatttaattttaaccagtttgaccatgaagtgagattttcacatacctgttataacccttgacaagttttgctaaagagtagattagcattttaagaaaaccttgctgtgcttttatttcagtgattaatttacagaaaaaaaccatataatgcccttttgcatttagttaatatgtttacacgcagtgtttttttttgcaagatttttacagtttttttttacaatttgcttaaaccttctactttaagacaattctttatttctaagcaaaatatacatttccatgccctcttataatctttaaataaaaacatcttttactgtttttacacactttccatgtaattccatgttcagtagtttcaatcacatgttataatggtaacttttagtaatttttaactttaatgtaaaacctgttaggttgttttaattatgtgctggatgcagataatgtttgactcctttcagcatagttaggggcttggttgcttccgtatgttcccaggtgctaccaattgtgaagcaggcacgttgatagtttttaaaggctaaataaagaagtagttttatggccagtcgcaatggctcctgcctgtaatcccagcactttgggaggccaaggcgggcggatcacgaggtcaggagatcgagaccatcctggccaacatggtgaaaccccgtctctactaaaaatgcaaaaattagatggatgtggtggcgcgtgcctgtaatcccagctactcaggaggctgagacaggagaatcacttgaaccagggagtcagaggttgcagtgggccaagatcgcactactgcactccagtctggcgacagagcaagactccatctcaaaaaaaaaaaagcagtttacaaccttaaaacatttagcaaactagtatttgacctgcataatttagaccacatttttataccttgaagacatttgtattttaccaataattcctaagactctttttatttttaaagattaaagtcacatgaactgaaaggtaccacagcttttacttttcccttaaaaatgtttgatttaagcgcttatttttcttaggccaattaattagagctcctttttttaataggcattacacaagtaacacatatataaccacacaaacagaagaagatccagcagttataagattttgcatttgccaatgtcccaattggattattggcctctgagtgaggttctttcagaacagagctaggaatacagcttccagggcctaataagcaagcatagccagaagacaaagacgattttgagaggtatttattcacctttaattccaggggctccgaggaaaacagatttttcctaaaatgggatttgtggtgcattttctgtttccccaaggagtcccaggccaccggaagccattctaggtgcaccaagagtggcaagacacagtaaaaaaaaaaagcaattcagtcaactgagaaaaaaaagtttccagatttatgaagatttatttaagaagatttatgaagagaaaaacataaaggccttttaaatatacccattgattggatatccacttttaattaagctgaatgctctttaagaaaatcctttttcattaattaaaactttacaaagaatgcaaacagtaattcttattatttcttttacccagtttgctccacttacctgttcacaatcatgtttaggttctccagttttctctgggagaaagtggctgggctcaggcaagggcaggttttcagctggactgcagatccctttagcagcaaagcttggtatttgaggaggcaattgtttgtcagccagagactttccttagaggacaacagtcctgttacattgtgtggggttaaacagttatttcccatggttaacccagtggcctctgacaccagcaaagcctccactgtaactgcttggaggcaggctgaccatcctttggccaccaagttttaagttccttgcttaagtaactcactggctgttgagctggacctcaagccttagttaaaacttccagggccatttccttcctttttgttacatagagactgaatgctttccccatggaaagactgagggctggtatgttatgttatattatgttatgttatattatgttatgttatgttatgttatgttatgttatgttatgttatgttatgttatttttgagacggagtctcactctgtcgcccaggctggagtgcagtggcatgatctcagctcactgcaagctctgccttccgagttcacgccattctcttgcctcagcctcccgagtagctgggactacaggtgcctgccaccatgcccagctaattttttttgcatttttagtagagacggggtttcaccgtgttagccaggaaggcttggtttagctggttaaaggctttttgagccttaggttcccaaaagagagaggggtgagttttaactgtttgagtttcttttatgaggtggtataaagggtgagccatttccctgtgcccaggtactcacagtttacaaaatccagtaatgcccaagaatttccctaactatcaaaggaaatgggcctaatcctttcctcacctggtgctctggtcccttctgataagaccagaactaggtactttactgaagtctgacagagctgagctttggattttgagactctatactccctttcagctaagaaattaaggagagtcttagcatcttcctgagccttccttgattggggcatagaggaaagtgttatctacatactgcaagaccctgacctgaggacgggaaaacttagaggggtcctttgacagtgcttgtccaaatgagtgagggctgttttgaaatccctgaggcagcaccatccatgttaactgtgtggtctggccggagggatccttacaggcaaacaggtattgagagtcaggatgtaacggtatgcagaaaaaggcatcctttaaatctaggactataaaccatttagttccttcaggtatttgagtcagcaaggactcaaacggatgaattgggactatggcccattaatgaggcagatgtcctgaactagtctccattccccattgggtttttatgctcctagtatcggggtgttgcaaggactgttacagggtctgaggaggccctgcatttttaggttattaataatagcttctagccctttcctggcctctggctttagaggatattgtctctggttaggaaaagaagtgggatttttaaggcggatctgaactggcctagcagttttagcttgacctattcttccttgagttgtccacacttctggattaatgttggctttcactaagggaagacaaagagtttgtcctggggccatgaggatgctggcccccatgtgggctaaaatatctctacctagtaaaggagtggggggactttcaggcatatttaagaaggcatgtgtaaataataagttccccccaactacagtgagagaaatattgggttagagtctttcctgagacacccaccatggttgtgctatgggaagaggggaggccttgattggacaggagaacagagagactggctccagtatccaggaggaagcccaccctccttccttcaatttccagaatcacccggggctcctgaacagtgatggcagtctgagccactggagccaggggtctgagccctaggacctgtcagtcctgccggaccatctgtgagactagttctggacctagtgacctccatatccaggggcagtttaatatccagtggtcttcaccacacgctggacagggtcaaggtggctttttcttgttgcctgggcaattcttcttaaagtgccctggcttgccacaccagtagcaattagtggatgcttcctgaggatcctggactctgcaagcctgcaaagcatctccttgagccttagtcactttctctttttctcctggggctcctcccagtccctatggtaaaagaccaaggtggccaccttcaggagatcttccaaggtactatctggtcctatagcctgtttttgtggtttccttctaatatcaggagctgcctgctttttggctgcagtgagggtttgacttagaagcaacataacagctctccatgtgaagtcaaacacttgagttagattttggaaggtctctgtctacctattagggacatcagaaaatcggcgcaagtctccctttatttttctacagtcctgtaatgagaagggaacatgtaccctaggggtgccccttccatctggcatttcttgtaggggtagaagtgaagctggggcagtggggagctttggagatggtgaagctggagaagctgatggtgcagttggagggggccccagattaggaaaactagaaggactggggcacttagaagctgcccccaatggctcctgcaaaacttgctcttctaacttaggggaattactctccacagacccgcctgatatgattgctaagagagctgagtcaattgtgcagtgcttgctaacgtctgggttgtctcgcggggcaaagaaagcctgtgcataggggaccttggaccatttgctctcctgtctacagaaaagatctaattgatggataagattaaaatcaaggttcccttcagctggccatgtctgttcatccctgagacagtaagaaggccatgcccttctgcaaaagaaaatgagctgctttttcttcaaagttttagggtcaaaggactcccagtgcttcagaatgcactccagaggagtgccggctgaagatggcttgttacccatctgcaaaagagacaagaatagaggtttcctcggtctcctggttcttttcaatgtgactcagggaggaggggacacagtaggagagtcctcctggctgttctccctccttggtccccgggtcccagcaccatagttgcagccccatggttgcaggtgtgacccccaagcgtaataccagaggacctaatcaatgggctagtcatgtttacccatatgacctcagtcctctgcctaataattgggtaattactctctgacctcctagacctgtgtgacctgtgtggcttcttgataaatggatctccggagagataatgtaacacttgcatttaagcaaggccccttaatagagggagtgtactggaatgagctttatactctgctattatggactggactagaggatttattcttaggtggtggttccggttaacttccagacataaaatcccctttctatttagatgccattctagttgtaggcagaatgggtgtcttcagagaacgtaagggtcaaatggtggccttcctgctaacagagagagtactgagactaaaatttggttttggaggacatgttcctccttgctgctgaaagcagagttctcccacttgcagagggggcataaggtttggtctctattagagggatgtaaaagggaggagaactgaaaagccagagacttttagcaaagggcagacaagattcctcatggagaggattcccattttactaggtggtgctagtggaataccaggcagtaactttgcctccatatgctctttaaacaaaggatggagagagaagtctgacctgtggcatgctgtccccacagcatacctcctaacaggagaaagttagtttgcctcatagaggggctatccggtccgactggacagtgctggttcctcacatgggaaaagaaacagcctaagtggacagaggggcatttactggggggaaaataacctcccacccaaccccaggaagtattatcattaggagttaaatagtctttgagatctggatcatggaattcccctgtctgtaaaaagtcagaaaaacagcaatcccttaacctgcattcctggttactacggtggttgctaaacctgcctaattgaattatttcctgggctataaaaattcctgcagcattgcatacagagaggagatgggagacatggtgactgcagaaaggaaaggaggaaaataagatttgcaataggaaaacttggagatcctatggctgacacccagtcaggcaatcagaggctggggtcagtccaggagccttttgaataacaccagggtgtggccctggccagaaattctcagttgctccaggacctattccagccccatacaacaaccaggctttctgtgaaaagaaactagtttggacacagccaacattcccggcaccctgagggcaggtcctccccagcaagcctcacatctgagtcttcaagactggtggccagcccttgtggctccttaatcagctgtcagatgcccggtgtttttgatagttatttgagagaataaaaacggaggacaagaagcctcggaagtgaaagtagagtccgctcctttactcaccattctgatgaagtcaccttcaaatcccagacgagccctcaaaatgaagcagccttgttgtctggggtgaatactgaggttcttggtcacacgaccagatattgaggtcaaggacatgcacacacacatcgagtgagtttggagcaggagtttaataggcaaaagaacagaacagctcacagtcacagagaggggtcccgagcaggttgctaagcagtagtaaaaatgtcagggtttttataaatggtctagggaggaggggcctcatgaggaggggatgtcttatcctcttagggcctgatggtttagctgcgaccaagtgtgctatctatatagagcagaattttttttatcagcttttatcccattccctgaccacataggctgactcttagtctgtgtttctttgtcttgcttatctgggagggagagtttctgtgtctgttcccatacatcttcttgcagctgcaggcatccgccccatgagtctgcttttagtttctctatcttagtgcacctaaagggaaaggaatgtgcttattaagacccactgttttactggggcccattgtataagtgtgaagtttggcaattacccaggagacttccaccccttcttctgtgcttgagctgtcttatctgtattttacagcctgaactttcaggttacttgttgttagaagagaagtgattttttttaactgtgtgtggttagaaagggagctatttttgagctgctttttgttaaaaggaaagttttctgctggggactcactttaccctaaatgtctacctaaataatttctttttgcctcctataacactggtagtgtcttccagcatgctaccctccagttagctccttgggggccaacaccttcatgctgggtaggtacagtgattctatgtgcaccacaaactacctggcctagcctctgcccccaagaccttgtctcagtagacttttggccagagaagtatcccctggttcttagctgctatttagaatctccttgagatttgggtaaaaacacttgaccatgagaccatctttctatccaaaaagaattcattttactcagcctcaatgttgctaacagtaacaacaaccgtagcaataatagaaaatgtttattaagctctactatgtgtcagacatagagatagatgctttccatgggttatctgttttaatcctgacagaagcttgtcttactgttgagaaggtaaagtatagtgagtgaggctggctgacttgcccacggtctcagaactattaagtggtatattcaggattctagataattcctagaacactttcctttcatctttgcatgatcagctgcctcaagtctgattccagagctggagttcaagccactgttctatgctgctgcccatctctgaagagaacattgtcctgaatctatgtatcttcttcttttccctttttcataaaaagagaaaggcataggacccaccttttttttcagtttatcctaattctttggttacaaggacaccataattcaaaatgtagcccatgttacattcagaattatcagcataaagggtgaggagacatttggcacaaccaaccccttttcagtgcctgttatgtgtgggccaatgcaaggcagactgttggagaagacaaggattataatccctagttcttgtgttcaaatagtctatgaatactagcacagctaaggcatgcacaaaaataactatgattaattcataatataacagtgacaggaggggcacaaataagatcccactggggttcaaagagaagagatcacatttcacttgggggcatcgggcaaagcttcttggaggatgtagatgttaaaatggaccttgggagatgattgagtttctgtaaacagaattaagggacaaggtgtttcaggtgaatggaatggcatgtgcggaggtctaggggagtcatggtaaatccacagaaaagtgtcttgcagcagtgaagtggcctcgtctggggtgacacccatggtttgttgtctcacggccacagatatcaaggacgtagacacacaaagagtgaggttaagagtggaagtttaatagggaaaagaaagagactagctctctgctacagagagggattccagaaaaatgggttaccaattcacggtgaaatgcagaggggtttatagatgagctgtggcaggcactgggggttggggggctgatgtctgatctacatagggcaccaaaaaccagttagaaacaggtgtgctatctgcatagggcatgaatctctgacagtccctaccccagtcttttattatgcaggtgggttttcagcctgagctgtactgtattggtcatttctttcttactgtacacatgctaacaaaaaagggaaggtggagtttccatggtggacatgcctggcccccaggtagcccttttctgttggtacagcggccagcattcccttgtgcaagctttcagtttccttatctacgtttgtagcttgatttttcaggctgctctttgttagaaaaaaaaatgattttgggggctgctttttgttacaagggaagttctgccaaggactcttttgccctcactatctgttttttgttttttttttcttttttgagatggggcctcgctctgtcactcaggctgtggcatgcactggcatgatcttggctcactgcaacctccacctcccgggttcaagtgattctcatgcctcagcctcctgagtagctggaattacaggcccccaccaccatacctggctaacttttatattttaatagagacaaggttttaccatgttggccaggctggtcttgaactcctgacctcaagtgatccacccaccccagcctcccaaagtgctaggattacaggcatgagctaccacacccgacctgccctcactatctgcttaaacaatttctttctatctcctgtatcagcaggaggtacttgcaaagcagaagtaggctggttgggagctttctgagaaagcaggtaccagaaggaggttttaggggtgctactgagaaagcacccataagaatcacagacatgcgggaatgacccacaggcactggctgggaaacaacatatgacagaatcatgatgctaaatggagggggttaagaggacatataaaccaatagactggtaatgaagggggtcaggagcctggagtgcagcacagttgggtaaagcacaatatttcaagagctgagtccatgaatttggctgcctagtgtccttttatgtggctatttacaatagtgaatgggatactgtagagagtctcaaatgtcaggctgcagtgcctaaagtaaatccagcagatgatggggagccattgtgtatttctgagcaggggagagacattgtgagagtttttctttttacaaaaatgaatctggcaagactctgggaagaccaaccaggagttaagaatactagttagcagacatctgcacttgtctaagaagaaaccctgaaatcttgaattggaatggttgtgataggaaataaaaagagtgaaagaatgcaaaagaggctgtaaagcaacattttgcatgaccgtggacttgaatgaagaggaaaggagagggtaaaaaaatcaaagctattgggctgggtgcagtggctcacgcctgtaatcccagcactttgggaggcctaggtgggcagagcacaaggtcaaaagatcgagaccattctggccaacaaggtgaaaccccgtctctactaaaaacacaaaaattagctgggcgtggtggcgtgcacctgtagtcccagctactggggaggctgaggcaggagaatcgcttgaacccgggaggcagaggttgcagtgagccgagatggcaccactgcactacagactggccacagagcaagactctgtctcaaaaaaaaaaaaaaaaattgaatctattttgaggatttcagcttggcttgactggggggaagagtgatccctttcacagaaacagggaatgaacaaaaggtaatgaaccctctctgccccttccacaccccctcctagctgagagtgccaagggagaaattgattgttatatggattgtcctctcctttttaaaaataggaacacggctgggcatgatggctcatgcctgtaatctcagcactttgggaggctgaggcaggtggatcgcctgaggtcaggagttcaagaccagcctggtcaacatggtgaaacccatctctagtaaaaaatacaaaaaaaaattagccaggcatggtggcaggcacctgtaatcccagctactagggaggctgaggcaggagaattgcttgaacctgggagggagagggagtgagctggactgcactccagcccgggtgacagagcgaaactccatctcaaaaaaagaaaaaaaaaaaaggaacagaaagtaggtccccaaggtatgtaaacttaaagttctatagcttcctctccacacctcacatctttttgcatctctaaccttgccaaggataactaaagtttggctgtattttttcatttctccctgaaatattttcaatagaatcatttctgaaacccattccaaccccccatacagcacaaacaacgaggaaacagaagattcaccaaacatttatgaacagccagctgttataaagacaagggaccaatctgaaaaatcagaataaagtctccttgttaaagctgctgcaagaaacaggcaagcaaaacttagaacatttttaatttgtaatttttgcttaaagttttggtaagatgttgtatcatggtaatttgtcagcagttctaaaagggaaccatttgtgttcaggaaagatagcttagaagtgcaaaacatagttccagattttaaaacacagtgaatgcagtaacagccaacttaaactctgcaaaatgccaaattggtgaattaacagacaagtttgaattgtttcaaaactcagaggagatgataaaaagataaaaacaaaaaaaaaggcaagaatatggaagagagagagaggagattcaaaagacatgaaaagaattctagaggagatggctgggcgtggtgtctcacacatgtaaccccagcactttgggaggccgaggagggcagatcatttgaggtcaggagctcaagaccagcctggtcaacatagtgaaaccctgtctctactaaaaacacaaaaattcgctgggggtggtggcacagccctgtaatcccagctactcaggaggctgaggcaggagaatcgcttgaacccaggaggcggaggttgcagtgagctgagatcgcgccattgcactccagcctgggtgacagagtgagactttctctcaaaaaaaaaaaaaaaaaaaaaatattctagaggagagaaaaaattactccagccaacatttattaaatgtttagtaagtgctaggcatttaattatattaacacttgcagcagcctatcgagggaaatcactgtcatcattcacatttgcagataaggaaactaatgtttagaaagttaaccattttcttcagtagtaaacagctaattaaaggagaggctaagtcccgaacctagcatctgtttcccaaaaagtagacaaaccctctgaataagggcctcttttcttagaaagccctctgcatgtgtttgggtaactccaatgtccacagaggaacctgctttctcattcctctctcaaatcacacttacctgctgtctcccttcttcccccaggcaccgatgaagacgccattattagcgtccttgcctaccgcaacaccgcccagcgccaggagatcaggacagcctacaagagcaccatcggcagggtaggccacagtctttcctgctctgtctggctgacttcgcagcaacaggaagcagggcctcttcctgatctaggttcccgaagtgaccttgtgttttaaaagatcgatcctttgtcttgtttaaagatgttcttgaggccaggtgtggtgggtcacacctgtaatcccagcactttgggagaccgaggtgggtggatcacttgaggccaggagtttgagaccaacctggccaacatggtgaaaccccatctctccttaaaaaatacaaaaattagccgggcatggtgctgagcacctgtaatcctagctactttgtaggttgaggcaggagaattgcttgaaccaggaggtggaggttgcagtgagccaagatcatgccacttcactccagcctgggcaacagagacagactccatctcaaaaaaaaaaaaaaaaaaaaaaaaaagaatagcgattcagctccttcttcgtcaattgatcttaaacaagttcttaaactctctgacccattccaggaggaaatgtgaataaacatctttagaatttggtccattttccaaataattatatttggaaactatatctcaggaattgagccttaagaaatagtcatgaatgatcacaaagatacaactaaatgccttatgtatataacagtagaaaaatagaaacaggtgactagttaaagaaattaggctgggtgtggtggctcacacctgtaatcctagcactttgggaggccgaggcgagtggatcacttgaggtcaggagttcgagaccagcctgaccaacatggtgaaaccccgtctctactaaaaatacaaaaaaattagctgggcatggtggtgggcacctgtaatcccagctacttgggagactgaggcaggagaatcgcttgaatccaggaggcggagtctgcagtgagtcaagatcgtgccactgcgctccagcctaggcaacagagcaagactccatctaaaaaaaaaaaaaaaagaaattatgttgcacctatctatagaaatctccacagctgctaaaaaggttatcagtgaatattgacttggaagtatattcaagacatattgttaagtaggcaaatacatttacatcggtgtctacaaacatattcacctcaaagttcctttacctcttaaattttttaggacttttggttttgtgggttatatcttttgatatttgccctattagaaactaaaactgagggcatttaaaaatagatatttgttaacttagtaaaaataataagtatattgtatgttactgtaaataacattttaatgaaaaatagctatatatcccaaaacgaaaaaacatttagtgagaagattggcattgttttacattttgcagatctctttaatgtctggcttaatggaagacagatggcttctcatatctatttctacttcaatttgttatgatatgtggttttggttggggtatatgaagaaaatctggcttgtacagatatgtacttgaaaatggggggagtatttgaacagacagttgttgatgcacagacaatgtcaaatagccttaggaaaaccccactgtatgcttgtggaagaatgacagtgaaaaggcaaataacatctgagtgttattctgaggatagttttgacttgcaggccccttgaaagggtcttggagaccccagacatccctggaccacacctggagagtagctggtctaatttgctatagcagttaagcggagctactttcttgcattgcaggacttgatagacgacctgaagtcagaactgagtggcaacttcgagcaggtgattgtggggatgatgacgcccacggtgctgtatgacgtgcaagagctgcgaagggccatgaaggtctgtgctcttcctctcgtgctcttggtgctgttggtgcaaacgctgatgtgctttcttaagaaactgtcacccaataagaaagacatggaagcaacctaaacgcccatcaatggtagactggataaagaaaatgtggtacatgtacaccatggaatagctgtaaaaaggaacaagatcatgtcctctggaggaacatggatggagctggaggtcattgtccttagcaaactaaggcaggaacagaaaatcaaataccatatgttttcacttacaagtgggagctaaatgatgaaaacacatggacacatagaggggaacaacacacactggggcctgttggaggatggagggtgggaggagggagaggatcaggaaaaataactaatgggtactaggcttaatacctgggtaatgaaataatctgtacaacaaacccccatgacacaagtttatctatataacaaacctgcacatgtacccctgcacttaaagtaaaagttaaatttttttaaaaaagaaagaaactatgaccaaggccttctgagagtagcaggtgtaaagtataggagattttccttcatttacgacaacttgaaaacatcattactttacattataccaattataatttaaaagttcttttccaaaaagttagggaatcatttgctccttcctgtggctcaatggggagtgattataattgtcgcttttagtacagctctagagacttttagctatctctagacagctaactacttttgagatatgtaactttatgactgacactttaggggcctccaggtctactataggcttacttctggcaaaagagttcctggcttccctagatgacgtacccactgtgccctagcctggtctgccaaattttaatgaccaagtatgtaatgcaaatataaatggtccccaccttaggatggttctacttaaaaattttcagtgtattgtactcctcatcataagtcgaggagtacaattatcctcctcaaccatgtcaataaatactcagacttgtggaaggttctgggccaggctctgggaaagcaaagaggtgacaaagtctttgccagaaaattctgcccttcagaggaagagagcagaagaggtcaaggaaaaattaagtccccagagggcagaaaccatacctacccgggcacagtaacgaacacataataaacagcctagaaatgtttgttattactcataattgttacggcaaacactttgggtttcgggtgggacaataaaagtgaacaaaccctgttgttagaacgcagtggattgtctttattctctgcagattcatgacagatgtattccttctgtgtctgggcctcagctttgtaaactggctcatatagccctgtcctctggtttcttgtttagggagccggcactgatgagggctgcctaattgagatcctggcctcccggacccctgaggagatccggcgcataagccaaacctaccagcagcgtacgtgacatccgcagtggccctggctgaggtttcgctgtgattagagaatgagggtagcagcgggttgttgtttgctgattagacttttcacagaacgctgagcatgagggatcctcggtgccaagctctgcttcgagggagatccctgtttagccaaatggcggtctgttggctccttaagatttctcaggtgaagatgacactctattttgcctacccagtgcagtattttattaccctaaaagttggaaagttgttccttattatcagacaaagaatctaaggtacttgttcaaaagtggtggcaccagcagatcttagcattccaaggaatggtctggaggggccgtctggcccaaattcttcccttcagactggactgtacgtcctccagccaaatcagaatgacagccattcactcccccttagagacctccagagggtgatacgtatgaagtgcctttaaaaaatgcctgactttttgccctaagaatataactaaaaatgcacagaggttcagatctcacagtgtttattcagcattgtctacattagctaaaaatgcccaagagtagcagattgtctaaacaaaatattatacacttacacaatgaactattatgtagtcattaaaacttatattaaagagtatttttttcttttatttagcctttttttttgagacagggtctcactctgttgcccaggctggaatgcaatggccccatcatagctcactgcaacctcgacctcctgggcttcagcaacccacccactgcagccttctgagtagctgggaccacaggtgtgcgccaccacacccagctaatttttgtattttttgtagagatggggtttcgccatgctgcccaggctggtctcaaactcctgggcccaagcaatctgcccacctccgcctcccgaagtgctgggattacagatgtgagccactacacctggccaagaatactattaaaatatttattaaatggtttggtatatgtaagtgaaaaagacaagccataaaatagtatgctatgatcccatttttaaaaaattaacacagttaataacacagtattttttaaataaatgaaaataatttgtgcatgtgggggaaaatgaggaaggatatttacagaaatgttgtcaatgattcttatttctgggtgattagactgcagtggagttcctcgccttgccccttctttttacttatttgttttttcctaagccttctgtggtcaacatgtgttacctttatagaaagaaaacaaccacaataagagctttgtgggaagtgttcagagcaggagattctaaaccttaggagtctggatttagcaacccaatccccacatctgcccaatgagggttttcttccctgagggctgtgaagggctggagcttctcttttcgtttttgctttttaaaaattaattatgaagaagtgatttttaatttcttgctgaagctccccctgcctattttttttgacacaggatctcgctctgtggcccaggctggagtgcagtggcatggtcatggctcactgcagccttgacctccccaggctgagatgatcctcccacctcagcctcccctgtagctggtactacaagcatgcgccaacatacccagctaatttttgtattttttgtagagatgggggttcaccatgttgcccaggctggtctcgaactcctggattcaagcagtctgccctcctcagcctcccaaagtgttaggattacaggcatgagccactgcgctcggccgtggagcttctcatggataacctgtcagaacctcccaagtgagagacgtggcagagaggcatatgctaggatttgcatttgacagcgctccaaccccagccccacctcaaagctgggttcagaagctcctatctggttgctttccatcagtgaagcagcagaggctgctccacagctgtggttccctctgtgtcactgagaaccacgttcagatcggacccctgggtggcaggaagcacagagggaggatttcagacccagctttttcaaccccacattttaagaaacaggaatatcttggctgggtgcggtggctcacgcctacaatcccagaactttgggaggccaaggcaggcggatcacctgaggtcaggagttcacgaccagcctggccaaaatgacagaaccctgtctgtactaaaaatacaaaaattagctgggcatagtggggcacacctgtaatcccagctacttgggaggctgaggcaggagaattgcatgaacccaggaggcagaggttgcagtgagctgagatggtgccactgcactccagactccatccagcctgggcaacagaatgagactccatctcaaaagaaacaaaacaaaaacaggaatatcgtgtgacaggataagctgatcttgaccattttaccagagtttagtttttgaaaaactgtgtgtggggtgaaaaaacctcatgataagctgcttccataagcaggctggtcttgaggggacagattgctctggagtgtgacagggcattgggcaagactcttaattctgaagtagctaatttcactctcttgctagaatatggacggagccttgaagatgacattcgctctgacacatcgttcatgttccagcgagtgctggtgtctctgtcagctgtgagtgactgcttctgatggggggcgggttttatcgaaatgtccactctatcccctttgccagcctttctcatcctttcagcccctgacatgtggatattccccaggtagtgttctcagacccctctgttcctttatcttatttctccttcagagactctggctaatcctgcctgcccattttttctactttaatttgatatttacaagtacctaacacctgccaggtccccctgtcactcagtgcattgagagttatgaagatgattcagaggcagttcctgggccttaagagtatatattgtcataagggaatacatcaggtacacagttgctagaaggcatgaaaagattacatgccaaaggagaggcgcataggaaaaagaagattcaaggagaaaatttggttgtagaaacaaagaaaagccttcatgacagagatgctggttcagagaggacttggaggattactagaatttcaagaggcagagacgtgggtgggtgtattgcagacaggaagaacagcaagaataaggcagggaacatggggttcagggaacaactgggtgaacagttgggctggtgattctggaaacagggtgggaggataaactggaattctatgttgggagcagtttacacttatttatttgggagcagtagatgacgtgatgatgacaacgatgatgggagtgatgtgactggagctgcactttcagaagagtaatgtaatagtgacgtgtaggatgaacagtggagaggaactggaggctggacgaccaggtaggaagctacctggaaaattccagctggaaaataaagcaggactgagctaggtggggcagggttgcctgaaaagggaagctggagacttcagacatttcacatcacttcccaattgcatctttatccccggcctccttcctgagcttgagactctcatttcacattgctttttagatgtttcattacagatattctactatacccttaatgaactgaaccagaactcattttcccttcaaaccagctcttcttccggacttgcctgtttctgttaatattgctgttgttcctcctacacctaaagaagcagaaccctggaaatcatctccaatttccactttgctcttgtctccaatatttacttagtaacgcctgcctgtgtctcatatttctttcccactttctcttttcctcccatatttaccactctgatgagccatgcctagaccatggaacatcgagacagtataacaataaaaatagcctaaaaactagaggaaagtagcccattttatcatttgttagcattcttcagaggcttccaccctgccttcttgtgagctggtgttggtgaggggtagggggacatttttatgggatcctcaagtcccaccataggtctcatattctctcgactctcctctgttcccaacctccccaccttttttttttttttttttaagattcaaggtcttgctatgtttcccaggccagctcttcacaggtgccatcttagctcactgccttgaactcctggcctcaagacatcctcccacctcagcctcgagtagctggaactacatgcacatcccgacccccttttggcagaggttgatcaatgtagatttgccagttaggaaggcatgagtcagctgggaagacacaggagagtggggtggtgggggaggccaggagatagtggagggagctgtccttgggaagcttctcctgctattggcagaggcactcatgcaacgttaggggccacactgaggctcagccctctaggcacacatcagagccattgtaataatgcgagcgcatttagaggacgtctgtcctccctccctgggtctgaagctccaattcttgtggtattttgtctcattactctagacctgctatcttaatggtgtccccagatcttcatgtatactctcgaattattttttatttgtttttctcatcctcagggtgggagggatgaaggaaattatctggacgatgctctcgtgagacaggatgcccaggttggtagaactgcagcttctttcttccagctttcttctctttcgccaatgagacaggccttagtgggtggatagcaacttatattacagtgtatattagccaggcttggatatgttctttaaaaatattcccacagatagcctttaataacaggtttcttgcagaggtacctggggctggacatcattatataagcactcctgggttccaagtttctcaacattaggaccattgtgtggcaatcccagagaaccactgtcttccgaatcccgtggaggtgaaagggactgttcactgtgcacttttacttcatcaaagaggacatttgataggacctatataaaatagcttgacacagtgtataccctgctgggtaaaattaatagcaaaccccaagaggcatttgcctctctgtttcccagcccagtgatggttgtcctggaaccaacccatggtctaatcagctgtggccagataacactaacgataatagctaataaaaagtgggtcattaccaggtaccaaacactgttctaaaattttttttttttttttgagatggagtttcactcttgttgcccaggctggagtgcaatggcatgatcttggctcactgcaacctccgcctcctgggttcaagtgattctgctgcctcagcctcccaaatagctgggattacaggtgcctgccaccatacccggctaatttttttctatttttagtagagacgggttttcaccatgttggccaggctggtcttaaactcctgacctctggtgatccgcctgccttggcctcccaaagtgctgggattacaggcatgagccatcgcgcgtggcccactgttctaaattctatattaagtatgtcattgaatctttgcaataacttcataaggtaagtattgctatccccattttacaaacaaggaaactgaggctcagagaggtcaagtaccttgctcaagctcagaaagataataaagggcagagctaggatttgaaccaattggcatctagacccagtattctctctctctctctctctctttttttttttttttttttgagacagggtctcactgtcgtccagactggagtgtggtggtgtgatctcagctcaccgcaacctccccctcccaggttcaagcaattctcccacctcagcctcctgagtatctgggattacaggatgcaccaccaccacccggctagtttttgtatttttaatagagatagggtttcaacatgttggccaggctggtcttgaactcctgacctcaaatgatccacctgccatggcctcccaaagtgccgggattacaggcatgagccaccgcgcctgaccatagacccagtattcttaaccaatacataaccataatgagggattggttccattcagtttgtgaggtatgaacaactttgttttatgcaaaaaaaaagaacctgttgctttcattagaggggatagaggtatgtgtgtggcttgggcttcttggagcacggcagctgggtttcaagaaggagcacccagaaagcaagcattccaatagaaacaatggcagttgcatgattgtttatgatctagcctcagagatcagtgtcacttccactaacctgtattttattctttttttttttttttttttttgagatagggtcttgctctgtctcccaggctgttgtgcagtggcatgatctcggcccactgcaaccttcacctcccaggctcaagtgatcctcccacctcagcctcctgagtagctggactacaggcgtgtgccatcatgcctggctaagttttaaatatttttttggtagaggtggggttttgccatattgcccaggctggtctcaaactcctgggctcaagcaacctatctgccttggccttccaaagtgctatgattacaggcatgagccaccgtgcccagcccacaactatgctttattaattaaagcaatgtattagtcagaattcttaagaggaacagaaccaatagagagagagagcgagagagacacagaggggtgtgtgtgtgtgtgtgtgtgtgtgtgtgtgtgtgtgtgtgtgtgtgtgtgagagaaagagagagaggatggagttgggcaagtaccaggatcttcagagggaatcagcaagctggagatgcaggccagcctatggttttgttccagtctgagtccaaaggcctgagaactaggagcagttcccatctgaaggccagcaggctggaaacccatgaagagctgatgttccagttcaagtccaaaggcaggaaaaaaactgatgtcctagctcaaggcagtcaggcaggaggagtccctctcactcttgggaaggtcagccctcttcttgaaaacaaaagctttcagctgattgtatgagggcccctcctccatattggatcatccaaaaaccctcacagaaacacccagaataatgtttgagcaaaaatctgggtaacccatggctcagtcaagttgacataaaataaattgtcacaagcctgttgagattcaagtttcagaagtgctgaataagatgaactcttttgaattaggtgaattagatgaacgctttcagctttaaatttttatgattatgtgaattgactctaaagcagtgagggaatcagagaaagaagtgaaaaaatgggggagtatatggaggtaagcccaatgagccacaatatgtgtgagttaagatctttttgagaaatgtaacaggcaagctgcttattaaaaatgaacagtaattctgattgagcaataatgtagttaaattgagcagaatgagtttcctatattcctacctggttggaatgtaagcaattggcaatgggtccctggttctactgtgagacctgtagcctcaggaaaatcacagatcattctagagcagggctatccaatagaactccccgcagtgatgagaacattccacatctgcactgtcctgtatgggtgactaccggctacctgtagccgctgggtacttgaaatgaggccaatgtgattgaagagctgaattttaaattgtatttaatttcaattaacatttaaacagccacatgtggttagtggcaactgtaggggacagcccaaatctagggcatttcttttagctcttaagatagaaccatgtagtctccagctagggaactgctagtgtttgccctgactcccaggggggtatgacagggtcccaacagccttatgcctgaggaaggatcctgagtcatttccactcaccactaccatttccaaccccatcaccaacaaaataaaactaagccagctcagctctttgagcttctggaaatatttgcctgtgtcctggcacatcgtttttggaattttagacctgtgctttgtttggcttcaggacctgtatgaggctggagagaagaaatgggggacagatgaggtgaaatttctaactgttctctgttcccggaaccgaaatcacctgttgcatggtaaggcacttacttcatttcccaaagaaaaggagtgaaagatagcaaaaactatattgcccataagtagttgataaccttcctccttcagttggtacaaagaactgattgtacccaagtgtcttagattctcaccctggaaatgtattagtccaatgatgtatatgaaagctaatttctgaaagattaattatgaataattagaaaaagtgcatgtagtcatagaagtttggcattcttgtttctaggaaactgaccttcacagtcagtcctttttctaaagtagccccagtattttcattctaatgtagttacatatgaaagtaatctgtagtagatcaggtagcaataaaatagcaatgttggttgatatttattcctgtgtaatatccaagctgtaaagctaatacaagtgatttctttaggggttatgttgtataagatgaatagtggataatttcaaatttgatatgtttctaatttgtttctgataaatataaactttgtaatgtgattttaacttatttgggggaaagatactagacaattttagaatatttgctgtcaggttcatattcttttaaacaagcaagtaaggatataataagatatttcatcttttatacgagttctttagatctttaagtacattataattttataaacccacccaccatacccttttaatcacacacactgatttgcaaagcttgtgggaaatttgagaatgagtttgctaaattgaaaacataaagcaattgagaagtacaacacattctgaagttgtaattatttcaggtttttcacagtgacaaaaaaacaggtgattactcctgttaatcaatatcccgggctaccatcaggtacacaaacttctgactcagcttctttcttcacttccttcccttgcctggttacaaataacaggaatctccccctggtggtgttttccaagaactgcaggtcctcagaagccgatttagtgcataaatgcatttgcaagaattttcacttctgggtacaagtcaatagttaggcagttatgaaatatctgtttgtaagccactgggagaaaatattttaagcactgtttggactaggaaaacttcataattgtcttaccaaccaacaataatggtgagatttcataataactaccgttttgttaataatgttctattttctaggtgcagtgttaagcattttataagcattgtttcttgcaacactcaatggagcagtaattattttccccattttacagtggagaaaactgaggcttagaaaatgtgtcaattaagttctttgattccaagccacacacactgacttcaatttaagtaagaaaagatgaaataatatagaatggcacaggagggaaaatggaaaatactggtagctcacagatttgaacagacagctgaacaccttcaggaagaacagaaatcaaggcagttctgggggtctcagtagaagggaataatggattttatttctaaagcagagtttctgaagttcgttttctattaaaaatgctaaatattgaccccctacttcagactggctgaattagaatctctgagtgtgacacccaggaagtttaataggtttctctgagggtaaagatgatgcagtgcttttggccatccccgtgagctgctcaattaaaaagttcccaggagagagtctaacgggtcctgactgggtcaactgctcacgtgtttgacagaggttgtggtgtatgttgttgggtatggtgtcccttgattgacagccctgttaaaatcacattgatggaagtgaggcagcaccccaaagaaggcgatggtgagaagataaaatagatacctgctctaagaagtttccagaaggagacagcaagagaggggaacatattcaccacattcaaaaatacttggcaaaaaacaacaacaaatgtaattatgtttaagtattttaaaagatgcaaccagctgttattaactgtgactcagttctgaagcagttgaattgttctagttttgatgagccaaaagggagatgacagggaggtgattgccaaggacaaaaacacaaaaagacacattctgcttattaaggaaacaatgagaaaggaaagcaaagctccccagaggccatctccattttatgtgtgagggtcccagataagggaaaggacttgactgatgtcctccaaacatcacagcatttcttcctccttatctggggcccattccactctgcacatccctcctggctgcttgcccacattactaattagtttcctcctgaaatatgccaaagaataaatagtgtaggctagttaaaaatgctcattctctccataaattttagtttcctctgttttttcttcccaataatactattttgttattgtctgcagtgtttgatgaatacaaaaggatatcacagaaggatattgaacagagtattaaatctgaaacatctggtagctttgaagatgctctgctggctataggtaagctggtagggggagtagagaaacaaatgtttatagattttccttctcattatcagtttgcaatatggggatatagaattatttttagagataaaagttgtttatcatgaatcactcatgttacattccagatttttaaacaagaaatattatatacaacctgattgctattgtgccatgtggtttatatattttatatcttctgtgcctttgtatgtcctatgtgaaaggtaataatgtgcagatatacaggctgcagcttgcaagtctgtgaatggttagaactagtaactgtctcatatggcagatacagtaatccttattttgaaatgaaataccaccctttgctttgatagactttatcaattacttctccaggaacttgatgataaattgagggtactttctatctgtgaaaatacatagagcatcgcctatgttcatgaaacattgcttggctaaaatttccctggcaaagcaaatattgataccttgtagaaacagaggaaacaactgtcacttttcttttttcatgggtcttatctgtaatcttttcatttcttctttttttttctttgacagtaaagtgcatgaggaacaaatctgcatattttgctgaaaagctctataaatcgatgaaggtaaatggccttattttcagcatctaaatgaatttgagttatcttgtgtccaccttcttaagcttacttatatcccctatccaaactttgctctgaaagatccaattcaattcatcaaatacttcagtgagtgcctgctaataataatactaggtgatatttactgagtacttaggatgtatggatcactgtttttaatagattaattatatccccacaacagctctatcaggctggtactattactaacctccaatttacagatgaggaaactgaggcatagaaaggatatgcagtttgcccaagattctcagtgaggaagtatggagcaagaatgccaggtgtttacctggcattctagctccagagcccgtattcctaaccctccatcgtactctgcaggctgagaatcacaggaggtgcagggaaggtcaaaatgtagtctttggccaggtgcggtggctcacgcctgtaatcccagcactttgggaggctgaggcgggtggattacttgaggtcaggagttcaagaccagcctggccgtcatggtgaaatccccgtctctacaaaaatgcaaaaattagtcaggtatggtggctcatgcctataatcccatctgcttgggaggctgaggcaggagaatcactggaacccaggaggcagaggttgcagtgagctgaaattgcactactgcactccagcctaggcaacacagtgagactctgtctcaaaaaagaaaaaaaaaaaaagcaaaacaaaacaacaacaacaaaaatgtagaccttgctctcaaagaatgtctagcctaggcaagtatgtgcaaaacaccaattataacaagacagaatgtaagacagtagttgaggatccaaacattgtagaaacacagaggaaagggtttttttttttttcaatatttgttttttgaggtggagaatctgcaaagaatatataaacagttggtatatttgagcaggaccttccaaatgtagaagttttacatcagaggatttcatgtggtgaagggaaggggtgataaggctggggagggaaggataatactccatgagaaggaatcgtaggtgagccaggtggcagggtatgtctggacagcacaggttatggctctagaaaagcagggaacggcatcctgtggtcagaacatagagcattggaaaagtgagttgtggagagccttgaataccatgataaagagtgaggatattcctcaggcctgccaagtagtggagcaaaggacatcgtcagcacagtcatctctagtcttgctttgatagactaaagaagacactgaaaaacagctaggtttttgtatatgtttggatttcgttttcttccttagggcttgggcaccgatgataacaccctcatcagagtgatggtttctcgagcagaaattgacatgttggatatccgggcacacttcaagagactctatggaaagtctctgtactcgttcatcaaggtaggtcacagcagcctaagtccagagtaaaggatccagaaaaggacccctctgaccttggcatttagcacttgttgtccccctcttcttggcatatatcatttcccttaaagattatgctcccgatatttccagtctctcctctttcacacagatatttaaacctttgccaggatacaagctggaaatttgccttctaaatacagtaattattttatgttgacctcagacaaagattacattttaatgaatacttttaagcacacaatttcctcgtctacctaattatgagagaagataaacaactgaatccagagtcctaggcaggggccagctgaggtctgctgggaatatgggaaagcattttagctatcctgaattactgttctttaccaggcaccagacttctaggagtcctaagagggcatggtagtggtgagaaatggttcacctccctcaaagccaggcattcctgggattttgtttcttgaggatgctggaagagtctcatggacatgaaagtgagacagatttccctaggagctaaggttgcctgcactgcaagcttcaaatcagcgttcgatctgtgaactaaatattctgaatcctactcaaagcttggagaggtgtgacaattaggtgattttaactgcagatttttttttttagatggagtctcactctgtcgcccaggctggagtgtagtggcgcaatctccactcactgcaacctccacctcctaggttcaagtgatcctcctgcctcagcctcctgagtagctgggactacaggcatgagctttgtattttttgtagaaatggcgtttcaccatgttggccaggctagtcttgaactcctgacctcaagtgatccacccgtctcggcctcccaaagtgctgggattacaggtgtgagccaccatgccccaccaagctgtggattttgttactacgtctacaaggcatgcaggaacttgtttctatttctgactaggctatgaggtaacttgattttgcagagctgaactatataactagtttaagattcaaggatgacggtaagtgaagttatgggaaaatatactacaaacaagaaaaaaacaaaataaccccaggaaatgacaaatgatttatggaggatatggagagactagaactcttgtgcactgttggtaggaatataaagcggtgcagccactgtgaaaaacagtctgttacgaaactttaagcaccaaacttcttcaaaaagtttaatatagaccaggcatcgtggctcatgcctgtaatcccagcactttgggaggccgagacaggtggatcacttgagcccgggagttcgagaccagcctagccaacatagtgagaccctgtctctacaaaatcaacaaaaattagccgggtgtggtggtgcacgcctgtagtcccagctactcaggaggctgaggtgggatgatcacctgaggctggggaggtcgaggctgcagtgagccatgactgtaccacttcaagactccagcctgagtaaagacccatcccaaaaaagaaaaagaaaaaattttaacatagaatgaccatatgagccagcaattccactctcagttatatacttaaatgaaaacaggaacccaaacagctagttgtacatcaacataaacattattaacaataggcacaaggtggaaacaacctaaatatccatcaacagatgactggataaacaaaatgtatatacatacataaaaagcaatgatattcaatggtacgctgtcatgaaaaaaaggaatgacatttttgatacgtgaatgaaccttgaaaatatactacgtgcaataaatcagacacaaacggacaaatattgtatgattctgctttatgaaatatgtagaataggtagattcatagggacagaaagtagattagaggttaccagcaatttggagggagaggaaagaatgggagttattggttagtgggtacagagtttctgtttggggtgatgaaagggttttagaaatagacagtgatgatggttacataacattgtaaaagtaactagtgccacttgaaaatggttaaaatgacaaattatatatatatatttttttaccacaagaaaaagtctctgaatttgaataaaattgtttaatgaaatgtgaaaagaatagatgaagtataatacttcatcatagcattatttatattatttacatggctttatgttatttatatttatatcaataatatggtattatagtatataatttattatatattgttattactattaatcaatagggaataacaaattatggaaaatccatacaatataatactataccaacactaaaatgattgagtacaaatatattgattggcttgggaagaaaacactataatctagtgtatatatgtctgtatatataaatatgtaaatatatgtgtgtatacacacacacaccactagaaaagattaaaaataaagaatacattactcattcaataatagttgtcaaaagaaatgaaaaaagcagaatagaagcataaaatatgtaaataatagaaaaaaatgacaaaagataaaaataaaagttataaaaataaataaactctcaggttaggtaaaaatataaaatccaacttcatgctgtttataagaaacaactaaaatacagtgacatgtaaaaagcttaaagaaaaacaccagggaaagaaagaaagcggacatacaagaaagaaagcggagattatgctattaataaaaagaagaatttagggagaaaaagtattaaataggagaaagtggatcacgttatactgacaaaggcaacaattcacagcaaagattaaactgttatgaaactttcagtaccaaattatattgcattcaaatgtataaataagaaacttgaggctccagaagaaaacatataatggaattagtatgctagcgagagactttaatacatcctatgctttggcacatcaatgaggcaaagtataaacaaggatatattaagattgagcttaacagatacttattaaactttgaaccctatatacagagattccatcttttctagtccccacgaatgactaataaaaattaatctaggccaggtgcagtggctcacacctgtaatcccagcattctgggaagctgaggtgggaggatcacttgagcccaggagttcgaagctgcagtgagctatgaccacaccactgttctccagcctgggtgatagagcaagaccctgtctctaaaaatataataaaaataaataaataaaattaaagattaaaaaattaatcaattattagaccacaaaaatttatatgcagaaattatagaacctttccggaagactgttttgtaacccatatcaaaatgtttaagaaaacaggctgggtgcggtggctcacacctgtaatcctagtactttgggaggccaaggtgagtggatcacttgaggtcaggacttcaagaccagcctggccaacatggtgaaaccctgtctctactaaaaaaataaaaattagccaggcgtggtggtgtgtacctgtagtgccagctacgcaggcagctgaggcaggagaatcacttgaacctgggaggcggaggtcgcagtgagccaggattgcaccattgcactctagcctgggccacagaacgagactccgtctcagaaaaaaaaaaaaaaaaaggtttaagaaaatgcatttagtccagtaattcccattttatgaaaatttatccagaataaatcattaagaaaatatacaaaaatgtaactacaatatgcttattgaagcagtgtttataatagtgaaaaattgaaacaacgtaaatatccaacaatagggagagggaggatgtgatcaaataaattattttacctgcatacaatgggatattctgtaaccattaaataatgttgtagaataatatttaacaaaatagggccctagcacggttgctcacgcctgtaatcccagcactttttgggaggccaaggctggcagatcatgagatcaggagatcaagaccatcctggctaacatggtgaaaccccatttctactaaaaatacaaaaacaaaattagccgggcatggtggcaggcgcctgtagtcccagctactcaggaggctgacgcagaagaatggcgtgaacccgggaggcagagcttgcagtgagtcaagatggcgccactgcactccagcctgggtgacagaacaagactctgtctcaaaaaaaaaaaaaaaaaaaaaaaaccacaaacaaaaatgaacaaaatagggaaataggctatattgttaagtgaaaaagcagaacacagaatactactgttctatcacattgggtatctagatacatagaaaaaagactggaaggacattcacacatcaaaacggtaagaatagtagtctctagatgatggaataatggttgatttttgtgttcttttttgtctttattttctacactgaataagtattaccttcgtaataaaaaataacaaaaaaaatttaaagctaagaaaaatccagccaagcttgaaaaagttggcttagatgactttgaactgtgtgtttcattttaaaatctatttatctaactttgcttccctatcgaacagggtgacacatctggagactacaggaaagtactgcttgttctctgtggaggagatgattaaaataaaaatcccagaaggacaggaggattctcaacactttgaatttttttaacttcatttttctacactgctattatcattatctcagaatgcttatttccaattaaaacgcctacagctgcctcctagaatatagactgtctgtattattattcacctataattagtcattatgatgctttaaagctgtacttgcatttcaaagcttataagatataaatggagattttaaagtagaaataaatatgtattccatgtttttaaaagattactttctactttgtgtttcacagacattgaatatattaaattattccatattttcttttcagtgaaaaattttttaaatggaagactgttctaaaatcacttttttccctaatccaatttttagagtggctagtagtttcttcatttgaaattgtaagcatccggtcagtaagaatgcccatccagttttctatatttcatagtcaaagccttgaaagcatctacaaatctctttttttaggttttgtccatagcatcagttgatccttactaagtttttcatgggagacttccttcatcacatcttatgttgaaatcactttctgtagtcaaagtataccaaaaccaatttatctgaactaaattctaaagtatggttatacaaaccatatacatctggttaccaaacataaatgctgaacattccatattattatagttaatgtcttaatccagcttgcaagtgaatggaaaaaaaaataagcttcaaactaggtattctgggaatgatgtaatgctctgaatttagtatgatataaagaaaacttttttgtgctaaaaatactttttaaaatcaattttgttgattgtagtaatttctatttgcactgtgcctttcaactccagaaacattctgaagatgtacttggatttaattaaaaagttcactttgtaagaacgtggaaaaataattttaatttaaaaatggtgtttttaggccgggggcgggggctcacgccagtaatcccaacactttgggaggccaaggcgggtggatcacctaaggtcaggagttcaagactagcctggccaacatggagaaactgcatctctactaaaaatataaaaattagccgggtgtggtggctggtgcctgtaatcccagccactcggaggctgagtcagggagaactgcttgaacccaggaggcaggaggcaaaggttgcagtgagccgagatcacgccagcctgggcgacagagcgagaatccatctaaaaaaaaaaaaaaaaaaagtgtctttaaagtgaggtatagtctttctctgatccacttttcaccttctgaggtttttcatcttggcccctgaaaggagctatttttgaaggacttgtgttactcagtttctacaggaattacaagataagaaaaaaaaaatcatatttagtcttatgcgtgcctactggctaatgttcacatatgccaaacactactcaataacataaaataatgtatgaacttattctctggaaatgagtgatgccctctgctctaagtagaccatttatattaaatatcataaatgtataaaggacattcatattctta

SEQ ID NO: 46 - DNA, 29035 bp, Homo sapiens
  source 1..29035: mol_type = genomic DNA
agtctaggtgcagctgccggatccttcagcgtctgcatctcggcgtcgccccgcgtaccgtcgcccggctctccgccgctctcccggggtttcggggcacttgggtcccacagtctgggtgagtggtcgcagcccggggagggggctccttctggagaggagagcgtggtcgcggggcactggattcgcgcggacgctcggccgagagctgtcccggtagctgcgagagggcgggtcggccccgtggcggggccctccgggctgtctgagcgccgccgggtccccgcggacctgcgcttggggagggcacgagttgcaaatggcgcgctaagcccgaggtttcttctcttttgcagtcctgcttcaccttcccctgacctgagtagtcgccatggcacaggtaaggccgtgcgccccccactgcgctggatttacccacaactttgtatgctgcgacgagggacttttaggatttgtctgagagccaaaaagtttaggaggaaagggaacctgctttggggacatcgcttccacttttcttgttccccctttgcttccctgcccccgtttctgtgtcccggttcttcccgctgagcgccctccggaaccagcaccgacgccgccaagctgccttcgcgcgcaacagctggtgacgtggccggatttgtgtgcgctcccttttcatgagtgaatgtgtaaaagtgggccttccccaaaatccagagagtagctcaaattagaaccggagcaagaacagctcatcgtggtcatgtgaggcgaacgcattccccccccaccccgccccccgacttcctttattttttttccgcaaagttttctgtattttaatactgtgattgagcattggctttttccagttgctcagcccagttttactaaaactgtaggacgtaggctctgattttttttttaatccaaaagattaaacacaagcgctgtttttcttaagcaatgaactcgtggaacgagttctcaattgaatttgccttgggactgtttcagaaattgataatctactacaggctttctttactgttttttttttttcctttttttttgagacggagtctcactctgtcgcccaggctggagtccagtgacgtagtgatctcgctcactacaacctctgcctcccgggttcaagcaattctcgtgtctcagctttccaagtagctgggattacaggcgccccaccatgcccagctaattttgtatttttagtagaggcggggtttcaccatgttggccaggctggtctcaaactccttgcctcaagtgatcctcccgcctcggcctcaggactgtaatcccactgcgcctggtttctttactgttattaatgtttatcaaaaatgtaggaaagagaagatagtttaaggtctttaaatattgaccatgttatacagtcttttgtgaataagataccagggcttaaaaactctaaaactgatttcacagatcttgtcaatctaaccggcttgtcagagtccagatagttttttttaaacaagtgttttaactgctaaaacaatgctgtctcttatttatagttcactttttatcagattgacttatcaaaattgaaaaaggtttcttggtcctttccaagtgaaaatgggaggattaagattagttgattactttatgaaacttacacagtgatcccattcttacctcctcttttgcacttaaatgttacagtaaaccaattctcatattacttcaagtggaaagtttggtttaagttcttctccatagaaaggatacttttatgtggaattaactttcctgagtaatatttttcctatcttgatatgctggtgtggtgatgtacatgaagatttaacaagcatcgaataataattccctctatctttgctcatttagcagtttcttgaatctcttgtaagttccccagtgatgtctgagggtccatcaattccttttcattatgtagactgtttacccaaatagtataagcgaacatattttccagttgtggacattaattttaataatttcaaagaatgattagtatcataaaggccatgtgtatagaaaacctaggagaatggtggtttgcatataaaattatgtacctgagccctatgacaatataacaccaagactgttttctatcaaaactacagtttttactaatcataaaagttacaagtaatgttttaaaaaagatacagagtgttaaattttgttctagttttgttactatttttggaaatcatgaaagtaaaacattttgttaaaatatttagtattggccaggcatggtggctcatgcctgtaatcctagcactttgggaggctgaggcacgtggatcacgaggtcaggagttcgagaccagcctaaccaacatggtgagacctcgtctcttctaaaaatacaaaaattagctgggcatggtggtgcacaactgtaatcccagctactcgggaggctgaggcaggagaatcacttgaacccgggaggcggaggttgcagtgagctgagatcgcgctgctgcactccagcctgggcaacagtgagactacgtctcaaaaaaaaagtttagtattaaagttgggtgcggcgtctgagcagtaagaatgtcatgaaggcaaaactaggctacgtaattgttcattagaagcttcatgaacatcagaatttttttgtttattttttatttattttttattatatatatatttttattatactttaagttctagggtatgtgtgcacaacatgcaggtttgttacatatgtatacatggtgccatgttggtgtgctgcacccattaactcaatatttacattagctgtatctcctaatgctatccctcccccctcccccccgcccacaataggccccggtgtgggtgtgtgatgttcccctttctgtgtccaagtgttctcatgaacatcagaattatctctatggtatatgtttaagttacaaggtttgatcagaaatattttcggttggtttaaaattattataataatttaaaaaagccctgtgccgagcaagcaggataaatgtaaataaataaatttgagatgaaactccttccagaggagctgactggatattgattgcatcttttcatgccattcattttttaaagtcaagtctctctggagctaatgttcacttttgggatcttagatcagggttacctgtttacccgtggcctgtgctgctcctggtgatttctcttggttccttatctgtttaactcttaagttcattttggctgctgagaaagaactagatcaaaaactacttggctgctttgcaagccactgagcaattcattggcattcagcaaaccctgatttccttatctaatatccagttctccttggaaggcctacataggtgatcaggctagttacaggcaggcagtccggctttcttcttttaatgacttagaagttcaaaatggtaaaaatataacagtgcttttacagcatagattcattcctgaaatacattttattcatataaccttcatactattctaaaatttcacaaatgcatctgttttttaaaaattagggctcctaagacctttgctttaagtgcttcttagacgcagtctttcagtttagttagtttacataatatgtaaacatatcatcaattgattaattgcaaggaattatactcctggcttcatttctttggacactagttttttgggtttttttttttctcccccgagatggagtctcgctttgttgtccaggctggagtgccgtggcgtgatctcagctcactgcaacctctgcttcctgggttcaactgattctcttccctcagcctccggagtagctgggattagaggcatgtgccaccacgcctggctaatttttgtatttttagtagagacggagtttcgccatgttggccaggctagtctcgaactcctaacctcaagtgatccgtgtgcctcggcctcccaaagtgctgggattacaggcatgagccactgcgcctggtgggacactagttcttaactgttctctttttcatccatgcatgcattcatgaatgcatgaggcttttgcattttcactatgtgccaagtattgttaaacatgagcgcaatgggaaatggatctaagatttattgatataatagatgcattgccaagtcttttgtgtgcattatttagtcctcataacacagttttggaaataggtattactatttttgtttcacagaaggggaaattgaggttacttagctggcattctttgtatgggacaaaggagggaagccatcatacagagaggtaacaacagcaaataaatacttaggggtgtaaaagagtttggcatgatggagtgaaactgcagtgaggtggggaaatcaagccttgtcttggaagggatagaacttttcaagtgttattcatggaatgcccaatggaacaatttggtaaaagagcatactctcctctgaccttcaatgtgaactcatgggaggccaatgccacctgctcactttaactcactcaagacatcactggagttattcttgggcaacttgagcacacaatttaactttccattttattggtgtttgtcaagggaagtcattcttacactggtaaagagacacaacattaaacacagagcattaaagaaatacacaacaaaaatttaaatcattttacaaatcttcactttgttatcaaaaccttcttttctaccacgatgcaaacaacttagtctgttctccagtgatgttttttttcccttgcatttgattttaagaaacaggtcaaaggtggtaggatggatagacaaatggaaagaagcaaaaacaagtaagatggagcatgaaaaggaaaggaaattacacaaaagtaagcaataggccagttcgagtttaacgctttgaactatatcattcactttttctgagttgggattagagcaagggttaggattgggggttgagagcatgtctctgacctctgatgtgtttgtactcctcagtcttcttggaggtcctaattttttccctgataattattttgctttacagctcaaagcataatcaggtcacactgacatttccctcttttatgcccttcttatttttttcttagtacagtgataaataatttattttctcattagcgggaaccattattgcaggaaatattaacgggcctctaatacgtacataaggtagggccctagtgtatgtacatggagtggggaggcaattgtcttcccagcttactgttttttggagtggctccaaggtctttggaaacctgcctcagaagaaccacccttaaaaatcactgcatagcggcttagcagttgctcagcttgtggtttgcttcatgatttccagctcctagttaatattacgtggaatgctggaggtggggggagggtgcggtatttgagtaaatattgattatatggaactggagaacaaagagagtttagtccttttctgtgtcttcaggaaggctttatttaaaatgttccagacaggtgaatactttctcatctttaaacttgaaattgttatttatgtctaagttctgtgtctagaaaagctacccttcccttgttgtttggttggtcttattcattttttttttggcatacctagtccttgcgggtaaagaactttttcatttagagaaaaaaaaagccaacaaaattatagacctaaagaatggatatttttgaaggtgagaattaaaagagtgaattgtatattttggccaagtattatctaagaatatattataattatcttcgtaaggcattggtggtagcagataaagggaattgaggatgaactgaggatgggtgaatgggtgagggaacagtacctacttaagagttggcattaatctgggtaaagtgtggggactccaggaaacaggggaagccctcttgaatgagtcatttaaagtcacatttgcagacagttttgggtgggcagtgatggggtttgcacaggatgtccaaacaagggttctgcccttcttactcatttctctgattcacatctggtctcttaataccgctacgtggctttgctatccttagtggatgactctgactgtatggaatgtagcaaaagtgtttcacaatttctagaaagctctcaaaaagaggactagcagttgtttcttcatgcttagtaggtgagatttttaagatgcttttcttccattcatctttcacctaatttccttcagtctctggtgtcagatatcttttttctttaggcaaatccctcatgtctcttctgtttctaacctctccctgtttttcacctctctgtctctccagaagtttcttcatagcctacaaaccttatcaagcctttttttttctcttaactgtgtttttaaaagcctgctttgcaaactgttgtttcattgagaccgtctttccctcaattcattcctgagtgtcctatagccagactgttaaacaccaccaaagatctcctagttaccaaatccagtggaccctttcactcttagctcttccttgacttcctgtggtattggacactgcctcctctttctttcctcttggaacatttgcctccttcagcttccatgccatcaccctccttggattttcttcttgcctttaggagtacagtgtagcttcatgggtaagagcccaggagccaaggtcctgtggcttcaagtcccatctctgctacttgcttgtttgatggtcatttgggtgactcacttgctaaaacctttctgagccagtatgtttctttgtctgtaagatgggatttccctgagatgatctatgtgaagctctgtgcacggtgcctggtgcattgctgcactcagcagatactagctgccactctgattgtaggtcaccttccctttccttctcctctggctctttccaccccattaatattgtcttgcgtggtggccccctccagctactaccggcgtatgctgacaactcaccaagcctactatggagaaatgcaaagtcagccatcctctttctcatccaaaaaacagaatcaccctaagtagttcctgtctacctggggcctgtttctgtccctgcctttgtttaggtcttcctttccttctttgtgttgttagtttctaagcagtcttcttgtcactcttgcacagtcggttccatcttgctgtgcagagttgacattgttcttccctgcctgagtgtcctccagtggcttcctgttgcctacaggatgaggtctgcacattttagcatggcttttgtgcccttcccctcccttcactgtgacctttcccttgtttttgtttcaaccttactgcttgttccagtctgctgaaatacttaactctttagccaaagtaccaagattggcctggcaaattcacaggcaactttcaagactgtttggaatttttttccgaattttttctcttttcacacttcccaatatagtcctctcaaatgtgctcacattgccctaatccagcctctgtgtgtacatattctactgcacttgattagttatatgcctgtcatttcacacttaacttgagggatcctgacttttaactagtagttagtataatactttggacgggggagacattcaaaagatggtgagtcaatgagtaaaaagacagatggactgcaaggggcattcagtcctaagttctcacattaagaaaacttgtagagtttattcatttttacaatgatactgatcaatttgaagtggtctcattaaagagaagctgtaacttgatctgagagaaagaactttcctaacacaggctaattttgagcatcatcttctcaaatcttatcaatttctcttctaaactataactccttttatgaagttgtcagtattcaaccattcagtttcatatggattaaggtatcgaatgaatggcagggaatctattggtctttatgtatctgtgctccttagatggggtggaaatggagactagcctggctgtgggtggatttccctcttggtggaatgaacagctctggcttagtttcataacctctccacgagacaagtgggagagaggctccccttccccttttcctagttggccacagtcccttgtttagctgaggcacagagggagtgaaagctgctgccagtggtgctttcaacaacctggggctgggacatcaacctggaaacacctctttttctcttgaattatattcttttggcctcatgatcataccacttgacttaggagttaaggtcgtgtggggcttcatgaggtcaggttttctgataagttctctcatagctgaccctgttccgaggaaagaacagtgtgtcttctcttcttgaacaagggtaaggactacagttgaagaaaaagttattctggtggtaaggaagacctcagtcaagaatactacaatgtaagtcatgactgttatcacaggggagagagattaggttcaactctgaatacagtgaagacaattggggatttatagctaacaagcagagtgaggtcagtgcatggaaagttactaacaggaaacatcaagttagggggactcgtgctaaactgacttaataggattcttgctgaaggcaggccaggatgatcagatgttgggggaggggatgaggaaattgatcagatatagagggtgccttagttcattgggctgctgtaacagaatactatagactgggtggcttataaagaaggaaattcatttctcaaagttttggtgactggaagtctcagggtgccagcatggttgggtgtggtgagggctctcttctagacattattgtagcctaacgtgacagagcagagagaggcaagctgtctctggattcttacaaggatgctgatctcattttgggggccctgctttcatgacttcatctaattctaattatctcgcaaaggctctacctcctatttaccgtcatgtggtggggtagggtttcaacatatgaattttgaggggacacagatattcggttcataacagagggtgatcagataccaaaagtaggggtatcctccttaaactgacttagcaagcttcttgctaggcaggcaaaggaggcccaatgacaaggactagttgagaagagggctcaggggagcctcttcaaagtgtggtcaaagggagagtctttgtcactatctcctggatccatgagtgccactttttcaggaagcctaatttagtgccactaaagagagaaggccactgaactgacctttgacactatgccctggggaagttcttcaccatggctatctctctctgttgtcatcttttaaaatttgattagtattatgttattgttggcatagcaacaattggaggctaagatggaaaagaaactttcctcctttttggtgactgtgcttttgtgcatttataataagacatgtaagattgtaaacgaggctagctttacagtccttttagctgtttgtttctcagtttagatggtacctaagcaggagttttgagggaatgtaaaaacatttattggtaaagtaaattctgggagcctccatttagcgtaagataaacatttatggctcagtattaataaagccttatgactctcaggatctaatgatatcactaacttttttttttttttttttgtgagacagagtctcgctctgtcaccttggctggagtgcagtggcgcgatcttggctcactgcaagctccgcctcccaggttcacaccattctcctgcctcagcctcccaagcagctgggactacaggcgcctgccaccacacccggttaatttttttagtagagatggggtttcaacgtgttagccaggatggtctcggatctcctgaccttgtgatccgcctgcctcagcctcccaaagtgttgggattacaggcgtgagccactgcgcccagccgatatcactaattttttttgaaatacgaagatattttggttattaaaagcagtgtatatatatgataaagtaatgtgtaacaggaagctttatgaagaatgtcttccaatacacctttataaagttctaaattcaaagatttgtattcctctggcacgtgaacgatcatttcaggctttgctgggttatcgtaaagtccctaagtatgtatacagaaacaggacttagatcaaaaggcacgtaacaagagcactgcttaaaattgagtactcaggatagggtattaagatttagtgcgggctcagtatgcttgtagatcaaaatggtgtgagacttaatgggaagggaacctgcaaagatgtgccctctgtgaaccaggaggtgttggtggggtttcgtcacagagaagagggagccagccttcccactgatggtattacaggtgatcaggatagcttctgtgctgaatcggccatgccaattcccattgtaaatggttcccttcccagttcaaaaggggtcacaaatcttatcaaatggtaaatttatttaatgactgaatatgatatatagcaagcggcttcctgtttgtgttatttactttgtcatattagtcatgatatgaataataccactgtgtttcgtgaattaggttctcagaggcactgtgactgacttccctggatttgatgagcgggctgatgcagaaactcttcggaaggctatgaaaggcttgggtaaatttagcttcctctttctaaagcaaatgtgatatttgtttttccaaacaagtcattaattacagtaagaataattttagaatattttgatctgaaatctgtaggagaagagatatgttaagataacaaaataatactataaaccagagtgtccagtcttttggcttctctgggccacattggaagaattatcttgggccacacataaaatacactaacaataatgatagctgatgagctaaaaaaaaaaaaaaagcaaaaaaatttcataatgttttcagaaagtttatgagtttgtgttaggctgcattcagagctgtcctgggccacatgtggcttgcaggccatgggttggacaagcttgctataaaccatccctaatattcagtctctagaactgaacaggcagttaaattcagcctctgtgcttttgagcttgtcaccctcacctgtgtggtagaggcccgagtcgataaggcagccatccctgcaggtgggcagctgtgcagctctgttcccaatcagatatcccattctcattctgctagactcttctctttccccagcctcttttctagtcatttaaaaacctctcatctcaaggatttccatgtgtcactgatctcctgtgctcaggctccttttgtactactgttcatgtgctttctggccctgtaagtccttccattgtatccagcccaccttttcagactcatctcccattactgtttaatgtgttctcagacccaaccatcctggcttatctgctgtttatgaaagccctgtatttccccactgctgagcttttctctcattctaaacgctgtccttcctttcgtcactgcctttcacaatccttccatccttcaatacttgtgggtgtcaccttctccatgaatcattctccaagattcccttccacctcctatcagctaggagacccttctttgagccccatttaacacctagatctctcctgaggcacttgtcacattttgccttagctcatacttatttgtgtgtttttaaaaaactaggtgccctaagttttttaaaaggcagaagtatttttccatctacttcacaataggttgggaatggggggtagaatatattggaaacgtaacattttatatattgtaaatttttaataaactgtttaataaaacatttatatatatgtgtgtatttgcgtctgtgtgtgtgtgtgtgtatatatatatgtgtgtgtgtatatatatatatatatacatattttttttttttctaagagatgggggtctcactatgttgaccaggcaggtcttgaactcctggcctcaagcaatcctcccatcttggcctcccaaagagctaggattacagatgtgagccactgcgccggccataaaatatattttatattcgcatagggagaggcaaggaaataaggtgactgggaagcgagttgccaagatcgttgggagagtatgcatgtaggagccaaaatgtaattgttaaccataaattgcaggcacagatgaggagagcatcctgactctgttgacatcccgaagtaatgctcagcgccaggaaatctctgcagcttttaagactctgtttggcagggtaagaccacacttcatcccaagagagaatgggagaacagctatcagttataagactagtttggaatatactgatattcttttgtaagcatcatttattttgtgattccgacttccctacttctgtttcttttccactctcctctaaattatcagctcttaggatacagtgctcacccagcttatcctcacataattgtttttccttgcctaatgctgtagaggtgccaaaagatcctgtagtgagaactgtctctcttcttttcctctgtgtttcccactcagcattcacatggatgtcttactatccattttctaggtgtaagcctgtattaaaatatgttttgttttaacacagtcacagtcttggttccttttgtcatgattttaactaatgggtttttaattagttgatttaaatgcttttatttgattaataattcaaaaaaatttatttgaattatttaaatgaattatttgaattatttaaatttaaatgaattagtgcatgcatggaaaacttaaatgtagtcttgttattctgaaaacgtatgtcacttaactaaggaaacaagtgcaaagcaaaaaagaaagtattctaaacaccatttttagttgtgtggtatgctgaaacttataggtaggaaatactgtgttttttttttcacaattacataattttttcataattacatacacaatttccccataggaacagatatctcccagtggtcaggagtcataacaatgactataatctattatgtgtttgaatgttattacatattgagagaaaagaaaaaattattacgtttgggtatgagagactaaatgttgtcctttgtaaatttcattatatgattattttttgaaattacaaagaagatatgtttctcagaatagtatttttataaaatagttttagactacttttaaaggtattcttttttttcaagttaagaaaaacatcttttagaaacaaatatcttgacgtataagtgggtttgctttagtttaagattttggtcacaggttaaaagtatgttattcaaggttatagggttttgtttagctcatgggccttctacttggagacagcaacataaagaattcattagagcaaaggactgtcattcatatttaagaagaatcttattacaatttctgctggttaacaaatttgtattttctgtgggttaggatcttctggatgacctgaaatcagaactaactggaaaatttgaaaaattaattgtggctctgatgaaaccctctcggctttatgatgcttatgaactgaaacatgccttgaaggtaaaaaggatgagtgaaaggaacattcttgcatagatagtattattttgttttggtaattacttcctcttatttgttatatttaaaaaattttatctgattatttcagtgagagttgcttggcagacaaaactgggaggcaataagcagtaaaggagggagaaaattacacgtgtgtcatttcatctttttgtagatttaaactcaataatactgggctgtttaaaattttcatatttttatagctttttgtattttattttcatgcctgtcttctgattttgaggatgtttaaaaaatattacagatgagctattttatctttttcagtagaaaattgcctgattagggaaccataatattgctcatcattttaggttaaaaggtaaagcttcagagagaattttcaagataaatattttctcatactctttccttctttcctgcccctctaaacactaaaatgaagtagctggtaaacttgctataatttcagttgcagcaaaaattaaatatgtattcccttgactggtgtttggaatgttgtataaatatgaaggcattgacacatttgtttaggctcatgggacaggaagtagttcagttgttagctgttagattttgaatgggcacattgagatttaacaaggaaataatgtttctcagggattcttactgatggagtggagagaggagaagggtcatcctgataggagctggtttgtgctcagtctcttcattttcctatggtgattcttttggaataaacaaaaatctgaggttattgagaaaagcactttttttgctaagtacttctgaaatgtcagcagtagttgaaattctgccagagaatgaactctaggtttttcagtgcttgatttttggcaaaaaatagaaatataaagaaaataaggcttcaatatactatcttttaaaaaaaattaagtccagctatatcgttgcatctcttagtttaatcatatagatgtgatttttaaaagcagaaaaaggaaagccaactaaaatgatttttcaaaaatccagaaagcaagtcccaattcctttatactgttctaattcctaataattaagtattgctatatttattgttacctttgatgtagaattttcctgtgactgcacagcacttaacttgggggtcaggggtttatcttttgaggtgcttattaagtatcagtgctcttccatgtacatttacgtgaagttttcatttttactctttcggtttttaaaaaattacttcatgtttcatgaaaatgttttacttttaagctagaattaactgatcaaattaaaagttacaaatttatgtaactggttatgtatacgtacacatatatacacacatacacatgataaacattgttttccattaggcaaaaagaataaaatggtctttggagagaaaatcatttaaaacttgttatttctataactaatagaactcatatacaaagaaatccatgttatactggataatatttatataactatgcaatttgggtaacatctataactttcttttaataactttctttttaatcttattgacatgttttctctattaaaatctccaaacagggagctggaacaaatgaaaaagtactgacagaaattattgcttcaaggacacctgaagaactgagagccatcaaacaagtttatgaagaaggtaaatgtttgtgagttatattttgacttcacctccactatcacttccttcatttctgtgatttgaatgcagtcctttgtaggtatgggaggcacgcagtaaatgatggatgaatgaatgaatgaatgaatgacctgcaattcaagctatttttctccttcagtaaggaaaagactgccttgttatcctctactattttcatattttataagaagctactgctgaagatggagtttacttttgcataggatttgcaattagtgtagggatatacaggttgtctttatgttaacattaaggtaaaaatggtttttcctcctttaaaaatatttagctttatgctagcaaaatttaggagttatataaaaagtacttttggaactttggaagagaaacctaaaccctttcccacatcagagttgataaagtacatttgagtaaatgtatgttgtcttagctaatggcagtgcttgaataaaatattctgcattttgatttttctttttagtgtgtcttttatatgaacagaaatctgcatttcggcctaaaatatgtctcatgaatagaatcaagaaaatgaagtaaaaagtagaggtagagagtccttttcttaccagatttcttgtagccaactctttctcctgcctgactgaggagggtcagactatccagtttctcagctcagtcaacagactccaagcctagtgtcttttgctaggggctgtatcttgccattagtttgttaatcttagaaatggctttgttaacccagcaagtcaaaacagcaaaaaattgtttagagcaactgtataattacctttctaaagggctgaatctctctttcctgcttctctttttataggcagtaagttcccaaccgctaaggcagaagtgatacatgtatctcaactttgaactttatttgatgtactattcaaagatctctttctggggatgttgacgttgatgagagcctttgtgctactggattacaaatggtgtgctcaaagggggtaataactgtgtggtctgtcctactcagccgtgtaattgagcactggctatgtgtctggcagtgtgttaacaggctgtcatgagtgacaaaaggtgtgcataacacagctcctgtcctcaagcagtttgtgtgcagtctcctcagtgggtgacatgacagaatgactgcaatatttaaaggataatgaaattcaaactaaagtaaaataccaatgatgttaaatgcaataatgcattcagaagagagaggtcatcatagctttggatgttagggaggcttcatggtacaaatcacacatgcagcagagtttcaagactaggtgggtttacaaagtgtccattgacagatgaatagataaagaatacgtacacacacacacacaaacacagacacacacacacaggagtactgttcagtcttaaagaggggaaatcctgtcatttcaacatcatggataaacgtggaggacataatgcaaagtgaaataagctaggcacaaggcataagctatgcatgatctcacttcttatgttgaatctaaaaaaattgaactcatagaaacagatagtaaaacagtgtttgctagggtgtaggggtggggtgaatgggagaagggactggtgaaatattggtcaaagcatacacgattttagttaggcaggatgaataagttctggggatctcatgaacagcgtggtgactatagtgaaagtataactattatatgcttgaaatttgtgaatacagtatattttaaatgtcctcaccacacacaaaaatatagactatatgaagtgatggatatgctgattaacttgattgtggtaatcatttcacaacgtacacatatatgaaaacatcatggtgtataccttaaatatatacaatttttatttgtccatcataactcaataaagctgggaaaaaaagactaggtgcattttgagtaggtagaaaagatatttttgggtgaggtactgcctgtctttaatggcatggagactggactgtggagagtgtattgagggacggagagggcctggctgctgtggaggatgtgtgcatgtccattgtgggaggtaaatggaacaagcgaggttaggctcagatatagatggttttgcatgactggattaggaatttggacttaattcacaggcactgtaaattcctgaatgagcagtggagtgctgaaggaacaattgagggaggaaggagatttgaattgagaggctaattggatagttatgtgtgtgggaggtaagctaggtatttaggaattgtggcccaacctaggtgagtgagaggtgtgaggaggataaatcagggacaggagaaacgtgataggatttaatggttaatatttacaggtgttggtgtagaagaaagaattaaagattcctacaaggttttgtatttgggtaacttgttgaaataaacatgtaactcttctgggccttttaaaatagaagtttcaggcttttaaagttcgtttgcttttgcataataattaaatatttaaataccttagagtaaggcctcctttcctttaatagcatctgtttgagagtagtgagaaagacttgtagactcttgtagatcccagttctccccttttatatgggcttacattgagcagctggaaatagaggtgggaggggggcctactttaaaatatcattgctgtctctcaagagttaactttatttctgcagaggaaaaataccttattaggagtgatggccatgcccaaagaaataaatctcagaatattagagatagaagacatttggaagctaaccatataaaagatttgaaagaaagcaaaacagagtttaagcttatgattgattgtgttttggagactttccagtaccatcatgtatctatagattaatgactacattggtcgagagaatttctaaatggctgagtcttgatttaagtttgaattgagtgcctttgggagactttaattcatttttgtccaaccactcactgaaagcatttgcttagagcattcagagatggaatagagggaatttatgttaaccaaatataattatttcttcttttacatcgctttcatttgattaatggggcaagattacttttctagttgaaagaagatgtaaataagtatgaaattattttgttgcagaatatggctcaagcctggaagatgacgtggtgggggacacttcagggtactaccagcggatgttggtggttctccttcaggtattgcgtggagattaattacagtttgattaaaaagcctgaagttggactgggctgaatctagttaagtaaggtcacttaaaattcttttaataatttgtggtacttgctgattcttactgcgatgattctgactgtatgttgcctgtgcttgtttgtgtttcagaatatctggtctaaattcttaacagctaactcatacatgttttagatagtagtatcttgttcctttcatagaatgatagcggtatcttgttctttcatagaatttaaaatcagtagggtcattattggttttggacagtgctgggtgatgataacgtgaaatagtgcaggattgatcttaataaaagcatattattcctagagaaagagtgttattgaataaccatcaggtggaaccatttttccttttgaatgagaatgctctatagttcagtaatgtgacatattacctctcataggctaacagagaccctgatgctggaattgatgaagctcaagttgaacaagatgctcaggtgagtgacaccaggatatgatgactttattatgctgtagaaatgaagaaataattcatggtaatgaaaaatcacaatgtatgttgtaatagcttctagtgataatcttgttaatgggttatttacatagcataagacctacataagtagctttttcttattctgacctggtcagcaaaatattttaccttaaagctgaaacgaaataaaataaattatatagtgagttccaactagacatgtttttttttgtgattattgaacattcacaaaatagagaattttaccaaaaaacagtgttattacttccactgccaattatgcagtgggtctcttagcaggagaagataaagaagaaagaataaagtatttaacagtaagtggtgtttaattacataagagatgacaagttattttggtattaggaaatttctctgcatttccttcgacagaattttaagtaggattggtcttctgtcagcagctttttagtgactccaaatgaaaatttcctcttaagtgacttataaacccctataaagtctcagtctggttaataaaacagttattaaaatataggaaaggaaatttgaaacatgagagctgaaaactggaaattggtaataaaggaattacttgggttcctagaaccaccaatcatagacctctttctggtcacatgtttcaattaagagaatatacaattcttggttgtttgtcatgtatcattgaaaaaggaagagccatattcattcctccagtggaacaacccatggatatgcgatctcactttgctaacaggaaagaggagagcggttattcttttgggtaggttgattttataatggtttcagaatgctgtcatctctgtctagctggagagaaaaaaagaactgaatgtttaccgagggctctctgtgcagtatttgactcttgcttcactctgtcttagaaaatgcaagccaattgtgtccagccccttcagactctggtggttccattgccctcaggataaagtccgggttcctgaatgggttacaagcccctttgttatctgtgtgttgtttacttatgcctccagcctctctcacatgctctctctgccctcttgcccctcccaccccgcttcacctgagtcctcttcaagagtcagtcttcagcttagatactttagagttaggtgcccctcacagggaaaaccatacccccccccgcccccaggcttcctgtcacagttcttgccacgttctctggaagccatctatttacttcactgccttcctgggccccctgagctgtcagttcaattgtatcctcagcttctggcatagagtaggtgctcagtaaataactgatgaatgaatgagcacataactctaccagaaaggggcaatttcccttttatggataaagaaacaaacccatggcttccactgaatagcagtggagttggaattcctaacgaggcctgtctgactccaaagctctttctctttcactagaagatagtcagtgttattgaatattaatatttcactataagaatatttcactgtaagatattcagtgttcttgagtattagtgccttccctgattttctctatcattaaagggcttattaaatatcaactcaagcatagatctagcttaattccaccttctttcgggaagagggctagagcaaccctacagagttgtactcctgttaggggctttgttcagtactgaggtgatcttactgctttccaagcattggttgtggctttgctaggagatagtgctgattctctcattcctactgtcaagagtaggataggagttctgggagcttttcagggtcacagtgtaagaaaccaactctagtcctctcagatgtctgcagtgaggcctgcattcacaggcagagggcagatttcccagcatagttggtgatgtaatgagagcattgctgcagcacgaggctcctgaggggaaaacagtacattttaaccttgttttcattgatttctgtccttggagcacttactggatagcactgctgctcaaactttcatgggcatgtggcgcacctgggacctttaattgcagattctgattctatgggtctgggcaggggctgggagtctggattttgaacatgctctcaggtaatgcctgcattcttggtcctttgattactgaggctgtataggtgacacttacgtgtcatgcagtggatataaccattcagaaccctgagagtacatgtgagactgtacatgtgaaaactgctttatggagttactttaaagtatcccttgaatggaatccaagcttttcttagccttccagtgactaggagcaatacagaacatgttacactggctattatttttgattctttcaaatgtattattattaattaataaacctgttgaaaacaaataatcttttggcattataaaaaggaacacaccaacttgtacctcgtagcaagggcagctggactgttatcactagtgagaatttgagatttcttaattgagagtaagctgagacagctaaagggctcttttataagcttttgcatttttgtctctactgatacctggcactaagaagatttctattatttgagaggtttgataagccatagtgagtcattcacttgggaactgaacgttttgtagataatccactttttaacatttttaatgtgttaaattgatttaatacttttaatgcattaaaacagatttaccttcttccccagtaaatccttgttttattctttctctggagggagagttgaactcttagaggaaagagggagaaggagaagtaatcaggcactttttacttttactgggcatttgctactgattacctgacactgttcagtgcattatcttagttatataatctccgttaatgactatatacactgaggctgaagaggagattaagtagttcatctgagatcttgcagatagaccacatctgttttgactccaaagactcatcctttgcactgaaccagggcttatgaaactgtactcaggctgaaccgtaaagcttagggaaggggtgtaagggtccctcatccagatggatccatgaatattgggcatcctcatttaggagaaaggatacttagattaaaacaaaactgttaaatatcattgttttacatgaagaagccatcattattattgcatatgattacttaataatagttttacagtagatattgatcccaaacataattctcccaagaaaattaaaacattgtggtaaaaataactgacatctcaccaattattcccatataacaggcttaactcctgtacctactagagaacatttctagacatttaaaacagttgataagaagtgtgtgcatcaatgtctgtgatattgtacaagatgagtcctttacccatttaggtgttaatgtatttgtatattttatctacatgtagaaacataccagaagtagtaactagcaccctcaggaaattgatattaaatagcaacttttcttttctttcctttctctttcccctttctcctttttccttttctttccttcacctttccttcccctcccatttccttaccctcccctttccttcccctcccttctccttcctatcccctctccctcccctcccctctccctcccctcccttctcctttccgcccctctccctcccctcccctcccctccctcttcccctttcctttccttcgtgcccaggctggagtgcagtgccatgatctaggctcactgcaacctctgcctcctgggttcaaacaattctcttgccacagcctcccgggtagctgggattacaggcatctgccaccgtgcctggataagttttgtatttttagtagagacaggttttgacaggttgcccaggctggtcttgaactcctgggctcaagcgatccacctgcctcagcgtcccaaaatgctgggattacaggcatgagccactatgcctagcctgcaacttctattttcttatttttgttctttcttagttttataaaatttctcaatgaacttgcgttgtttttgtaattaaattttaaaagttattttaagaaaggtctgtgtcatcatgatatagttctaaagtttagatgcatgcatgactttcagagttactgtcttttcaggttttaagagcatgttcacatggccagaattgatattattcatttttatctttaaaataattaattttaaaattgagcataaagatacatgagtctcatttttttcttattctccagaaatataataaaaaatagatctttaccaccataatctacatttttaaatatactgtgatcaaaacttctatattcaagcctgttattatcacttcctgtctttatttggattgctgcttgtgggtataaggccaactgcaagtagcagcctcagcaaattgcattcatcttgctttaatatgtagacttagtttgaaatgaataaaaggatagtacagtcattgtaaaggttgattctttgggttttaataaattattctcacgtcaataagtggattcagagttaacgttgatgtttgtatataagcttatttttttaggcagctatacgtgcacaagaaagcatattttttccccatgtcaaaaaggaagtatgggcactcaaactattcaaccactacttattgagtgcttctatatgccaggcactgtgctatacccacaatcttttaaaaatttattgtgatctttggaaatatgaaaacattttatagctagccttggttaaatctcagttgtaaagagaaaatatgaagtgtacttttactcatgtgctattgaacagctatagaacaagcaaaacagaaaaggcagacaacttagcttccagttaaatcctttcccagtctatacatggatgtatcaacagtgaggtagtcataactttctcctgacccatactgttgcttctgaaagattggaggttatggcagacattttgggaacatgtaaccttgcaccattgccgtgctttgttgcttggacccatgaatcttctgtggcacagttcagtggcaagctccaaaggtgctccaaactcagtgagctgagtttcagagtaggacacattagaaatgaaaactattaatacaagatgatgaatcaagtgagttaaaattcagggagtaaaaaacaagtgtgtttaagaacctggaaatgagatggaggaacaatttattaattgagtttgaaatttttgcaggctttatttcaggctggagaacttaaatgggggacagatgaagaaaagtttatcaccatctttggaacacgaagtgtgtctcatttgagaaagggtgagtgaaaaaaatctgtatggggcagatacattggtaaatttggaaagtgcatgagccagtgtgacagaatacctgctacatagcagggacttagagaatgaatcagtttttgtatttcttccttttggtgacctggagaaatctcaacattgtttttgctgctgttgtagcttttacaaactagagatcctgagtccacccttcactattggaggatggcaagggaggtcagttctctagattgttcctctcatagtcacacatcactgaatagtggctcactacacgtatttcctcctagaggttggtacccaggaccttatctctggatagtcatcagcacttgtggtatcagttgggaatgaatttagtgcaagtgacagagaaccctaatagtggctttaaaaattgggctttttttccagaggtgggattccatggttgatttggcaggacctgagatctttctggtttttctttttgctccattatccctagtgttttggttttctttcttcattatcataagatgtctgctctagctccaaacttaaccatttcacagcaggaaggaaagaaaagggtaaactagtcctatctgtgtatcactttttgtaagtgaggagatttctcagcatcccctccagtagatttacctttaggtctcattggctataactcgtaagggggctggcaatcagtgaacaaagtatatttacaatccattgcttagggcttggcacattgaggctttgagcacaaggttctgtcagcaaggaagaaggggagatttgtgttcagtaagacactacctaatcaaagtaaataccatctttctggaaagagtgatccctacatgattagggaatcatttttattttttctagtgtttgacaagtacatgactatatcaggatttcaaattgaggaaaccattgaccgcgagacttctggcaatttagagcaactactccttgctgttggtaggtgatttacaatgtattgatatttttggtggtaagagctaaagcattttattcaattgaggctgcatctgaaaataaccacctaggtgtgaaggaagagcttgatatgatatttaggggaagcaaactcccaaatttccaattcagaaatttattttgatgttggaaatacaggattgtctggttagttcatctaaatcctatggaaatactaagataattgtttaaaaatcattttgaagctgcattaaaaatattatttattgataaacctgaaatgtcgtggacattatctcagaggcttgtaaacattatttctgatacctgtggaattttagaatttttttgaatactgttctctcagctttgaggcagactaagaaattgtcatctggtttagaaaagaagaatatctttgatgtaatagaagatgtgatgatggttgttttcaaattaaataatttagttttattttaattaaatattcagaataatctggaaaaattggagaactgaatctgtgcagttgattgcagtattatgtactccaaagctagggagaatctagtttgtgagtctcctgtggtccttttgttcatatgggtctgcagtgagcctctgtctgctgtttgttccaagtatttggccttgagctcacacttttgtgctctctgtcttcaggagactaagctaaagatctgcatgaaccaactctaaaagtagcctttcacttgagtacacagttaatgtacttttaccagaaaacttttagacaggtccttcataattagaatacgcatacaaattaagacattttcagttactggtggctgtttttcttaagacttagaaaagggagaattaagaaatctccacatgcaaggattatttttgtatattaaggaattttcatgatagattttctgaagctaagcagactgaggtctgagcagccccaacctacattcaacatgtacatgttcagagaagagatcctttctgatattgatttatctgtttttgtactgaaatggataaatctcatgctgctctgtgtgaatcattgatattaaagaatatgtagagagtataggaagatcacccaagagtttaaaaaaattaggtagtaatcttgtattatttgctttaatgtcttggaatgaaaacttccaagggatttgtgtaatttattggtgatgaagaatgttgtggtattatgataacaatccaggctgcccaaactgcagtatccaaaaagtcttcacagaaccaaggcgcatagaaaaacctgtgcccttattctccatgcctttctatgcagacctcagaactccaaggaaaacctaagccagtgtctaagaaaatacttggtgagtgaggaaatcagattagcttacagctctttagcctctggtacttttgtgtttttatagaagtagagctataagcaggaagcagcacttgatttttaattacttaatcctttacatatcaaaatagcatttgaccattgtattgtttattttcttagtgaaatctattcgaagtatacctgcctaccttgcagagaccctctattatgctatgaaggtaagtggagaccatgaaccttctatctaatacatttctctttctaattattattcttcacttttgtttatgttttagatgatagaccttgggaatttttcccttataacattcaacccagttctactaaattgttataccttattgattcacccgcacccgggagcatttgatcctatgtttgaagtttttaagcattttgcttctctctttttttttttttttaaagggagctgggacagatgatcataccctcatcagagtcatggtttccaggagtgagattgatctgtttaacatcaggaaggagtttaggaagaattttgccacctctctttattccatgattaaggtagtagaacctttctttaaattacgtttgggaatccaaagcagactggtatgttgcatgaaagacaaggataagagaacctgattcttgtgttaagtttaaaattttagtgacacgattagagcaatgagttaaaaagcttagcataatgtttcctgaagtagagatgatggctcccaagtgaaagcatgggtattgatgtggctgaggctcttggtgaactcagaagcattatttagtagtggtaacagatgactcaacaaaccaaaccccttgcctatgataataatgtgttctttctgtcttttatcaattccagctgtctttattagtccttcttttatttcatatcagcttttcctttctttatcgtctgttatcaccttatctctgatgctggtttctaattcaggaaagagccaaccaggtcatattgggagtaaagagcccctaggtattagtatcatttttgttctttttaaaacaaggtgctctgtggcctataattacatttagcttaaagtcttttgactttttttttttttttccagtaaaggttaatgtggaccatgtgcaaagcaagatttcaattgagcagaagcttttagtttagcatgtttgtggtttggctggcccaaaggacactagagagtttacccatgcacttttagcttgaaacattaatttatcatgcatgtctgcatgtgagacaagcagatgcaaagcatgttctgcccttctgtctcggagggagagccatgacagccctgcagccccagcactgcccgtgttagctgatatataccaagtgatagaaactattctgtctagaaggcttgatttgactatagttgttaaagttgcctgattctttgtgttaccagagggaatactgagtgtctgaggttacattggtaggaaactccctgcataacattcctgatgtgaaagtcacagagattacccacttgggagaagagtcttatgaataaaatttgttgccagttatttagttttaaaattttctatggcttctgtgagtcatggaggttaatggaatacatttggtttcagggagatacatctggggactataagaaagctcttctgctgctctgtggagaagatgactaacgtgtcacggggaagagctccctgctgtgtgcctgcaccaccccactgccttccttcagcacctttagctgcatttgtatgccagtgcttaacacattgccttattcatactagcatgctcatgaccaacacatacacgtcatagaagaaaatagtggtgcttctttctgatctctagtggagatctctttgactgctgtagtactaaagtgtacttaatgttactaagtttaatgcctggccattttccatttatatatattttttaagaggctagagtgcttttagccttttttaaaaactccatttatattacatttgtaaccatgatactttaatcagaagcttagccttgaaattgtgaactcttggaaatgttattagtgaagttcgcaactaaactaaacctgtaaaattatgatgattgtattcaaaagattaatgaaaaataaacatttctgtccccctgaattatgtgtacatgtgtgtttagatttattattaaatttatttaacaatgtt

SEQ ID NO: 47 - DNA, 57074 bp, Homo sapiens
  source 1..57074: mol_type = genomic DNA
gcggttgctgctgggctaacgggctccgatccagcgagcgctgcgtcctcgagtccctgcgcccgtgcgtccgtctgcgacccgaggcctccgctgcgcggtgagtgggctgaggctggagaggggagtcgctctgggaaccccttcccgggggctgcagggacacaagaaataagcgcccagtcatcggctgatgggtaccccccgccaggagcagggacgggagggcgcggtaacccgagagtgtcgcagactgggtgtgtctggggagcgcagcggagcaaatctggggtcggggcggagaggcgcgggcggagggcgccctggctagggggaggggagggagtcccgttgctgcagagggtctggttgagggtcctgggcgccggagctgagccaggggctggtcctgccggccttaatttgggggggctcaagagactttgaaggtccggggttggggtcagctggacgccagtcaaaggacccgcagagaagggtgtggctgaggcccaagactgagagcaagagcgttggaccctccagctgcttataaaatggcttgtgtgtggtgtcgggggagggctgcctgcgtgcagagagctgaacgtccggtcgtacatacctcagggcctcattggaccccatcccctttgggccactgcttgtctatgaatgcagtctcccaacggggctccgaggcctcctatggtgaggcaggggcactacccttctttctgcatcccctaagcggtctaggccttcccaaagtttgggggcttcaaataattccccatataccagcatgggagcaaaataccctgaatcggaatcccagcccctgttgcagtgtgactttgggcggtggctttccctctctgagcctggatttccttctccaagtccatagttgagaaacccagtctctttcaaaggaaacaatggctttgaaaactgatttatttgtcagctgtatggaatgattgcaggtttgggagtcttgattatagatttgggaagcctggcacaacccttgtaggccctacaaggggaaagggcaggaggtcctttgggacaactaatctggccacggcttcctgcctcctccttcctttccctagattctagtgggtcttctctgacaattccaaatttggacatatggctcccgggtttgtgaaaggactctggtttccccccaagagtccgcccttttccctccattattccttcccccttgcccaaaacatgcttgggattgcttccactgacccagatggcatatcctgacctgcgtagcccttcatggtgaagtgaatgaccgccccagtttcagcccctgtggaccctgacctcctagcaggcaggccctgagccacgccgagggcactggcctggggtcagaggaaagcccggttacagtccggatgtgctgggacttcttgagcaagccctttctctaaggctttgtgccccatctggagcaaagtctgctgaactggctgccactgccagtgcagacattctaggattcaactgttctaagatttaggattctgggagttggatgggactggggagggcaggaggcagaggctttcatccccctctgcagctgtgacaatcactcatccatctttctttgccttatctaccctttgttcctaaggcagcatctgctgagatacagaaaatacttgcagtttctggataagggccacagctgttgctggggcaaaatgtagatgtgagtgtgcagaggaggggccagggaagcccaaggcctggcctcttgagactgactcctgggatgaagtgggggagactgcagtgctggatagctgccagtgactggcacatccgcactgcagcatccagagggagccctgggccaccaggatccagcctcggacccagcccctgccctgccactaatcagctaggcgccctgggcacacctactacccctctggggcttagccccttcctctctacagggataggacatatacccaggacaccccactggtattaataaaatgggttgggtctgaatggcttttgctctaccattctaggattttctggggaggcccagtggaatcaccagcctcaccccacccagcctctccgatatacttcctgggtggcgacaaagcacaggatgtggtctctaccgtgattcctgagcatgcatgcaccccttctcctgccaatagaggggaggaagtcggaggggtgtctttatgcctataaacttgccttggaatccagcctcactccctttcctcctggagttgagaagcccccacagagactggctatgggggagtgactgtctataggttccttggatgtcctgcctatctgcaaaatgagaatgagatcgataccttcatgaggctgtaagatggcagatataaaagtgctgtgttatctcaaaagggtgtggtgcttgagaaggcaggcgacctgagcctcaagttcctcttctgaaaaatccatgtcctggtggtccttaaataatagcaataaaatggtaaccactattacctctcgaacccttaaatttgccaggccccggctgaagccttgctatgttagacgctgttattaatgcctattttgcagacatggaaactccagcccttaacagtttaaggaagaaataataatgacaaatgcttataaaatatagtgcttcctgtgtgccaggtcctcttctaagctctagacttgtcttaattttttttatcctcatcataactcctatgagggaggtgctatttttatcccttttttttttttttaatatgaaacaggcacagagaggctcaatacttgcacaacaccacacagctactaaatatcaccctcaggcttcaatctcaggcagtctggctccagcatctatactgtgagacactactttgctgcctctcacaaaagtgacccaagctggggttcaaacctaggctagactagttccaatcctgaggcagagagatgatctcctgaggccttgtccagtcctaggatcaatggttctgggtcaggagaggaaaagacactgctccctaagaaaccccagtcgtcaagctggggggtgtgcccacgcacagagccagggaaggcatttaccccagcttcatcagaatcaaggctcctggagggttatggagcgggtcctgggtgtcttcctgcagaccgggggagaagccagcaagaaagggcaaagagggaaggatctagattttataggccaggggccttctaagtgggatggatataccccaggacgcactgaagatgatcttttgggggtacaggaagaaactattggactccttattaaatgtacttttaatgtcatattttaaaggtatatttctgtttatcatggtaaatactcaatttttctttggttatgggttgtgtatgggatcaatatatatatatatatatatatatatatatatatatactgcaaactgccatatgacatcaccttatcaccagctttgtggggccaggagccttgtctgtctcattttctgttcaacccccaacttctaccagtgggcctggtttgtaggaggtgctcaaataaatgtttatggaaaaacacgcccctgcttgatgactgattttcttctgatgttgggtaagtgacttaacctctctagtttatctcctggctatagaaagaggagtaaagcacagtttgaaaaccaatagtagatggttccatttgctgaggtcactaaagaaagcatgaaagccacttagtgcattttacccccaaccatccataggagccacgccctatgggagggggtgcaggaaagaggcatatgcagtaattttctaaaaagtgtaaaattatgactcatgcagatacaaaaatgatcatgtgctgttctacttattaatcaatgaccacaccaggccgatgttataaccagctcaaaagacacatttgtattgaaagaaatgtgcaattagagacaaaactctttttttacctgagggggtgggaaatcaattggacctttacaaaatagggcaaggagtatgtattagaattactttgtgttaccatcaattatttgcaacttactgacctgtaaaatcactcaaagacaatgaaagtctcgagtcagacaacctggagggttttcctttgaagtacagattctttcccataataccttggaggctggcagcccttatctaatggagaaatgataaatccacagtggttgaccaaagccagtcaaatcaaggtggtttcagagcaccctagcgggggaataccttctggcttgttagaaaaggcggcatttgaatccagcagataacagtggttctcagcctccttggctgccattaaaatcacctaggaaagtttttagaaattaccaaaggccaggcctcaccccagcagttgagtcagaatctctaagggctgaccttaaatctttggtagttttgaaaaattccccaggttctgttagtgaagctagaattgaaaagcactggtatagattctggaaagctggattaaaaatgttggtggaaggcgttcctggtttagcagggaagacagggcaaagaggaaagtggtgatggcaaagaagtcagtaaggagaaccaatggcctcgactgctgagcttagaggcccagtattaaggggcaccattggagacttgtgagcagaggagtgctgtggctcaggctgtagcccctcaggcactcccctgaggcagaggtctgggtgggtttttttgcatgattttccatattatttcttttttctcaaatcaccctcccaccacacctggtttcacccccttacgctcaacatctcctttccctcaaaagtgtactctgttcctccacagcccaagctacctttcgatgacagaaatgctttttcttaccctggtgttactattcttcctggcatgcccctgcctccattccattgaatccagattttgactgtgcacctctatcagcctgcacccctaatattttctttaactttatacatgtataacaaataaaaatgggacataaaagggcaagattaaaacatttggaaagtggtgatactcttgtcctgcaccccagtggattgtcatacccattacccctttttggagactactgctgtaataatgatgattgtggcaacagaagtcaccgtttgttaaacatttaatctgtacctggccatgctaagtgttttacctgccttatttcattgaatcttcacaaaaaccttacaagagggtcatttcaggatgaagaaactgaggcagagaaattccataacttgcccaagttactgagctcggaatttgcatggtcaggatttgaacttgggcatcgaccacaaatcctgcattgattctaatgccacattgcctccattgtaaatgtttgggcttattataataaaagccaccatttattgagcctttactgtgtgccacgcactgtgctaagtgttttccccccgttacttcatttatttctcagtacctataggtatttctatctgcattttgcggatgtggaaattgagattcagtttaagtaacttacttacatcacaaactgctgggcaacatctgtgcctgaaggcccatgccttcacatgacttggataaaacccttcccctatccacatctctgtggttgggcagtggtgagccgttccttctagagtcagcctggaactctcgaaggggaaggaggaaaacgtgattgattgcaggcaaaaggatgaggcaaggggtggccacagcagcacaaagccacccaggccattcattctgctcctgtgtgggtttcacgaatgatcagtcatgataagtcgtcacagtatatctcatctagatctgagagaatcagggttcctgggaggaaagaggcacaggtctggaatgaccctgtttactagtcttgaacagctctttcaaccaaggtgatgaatgttgcatattggcgggtggagatggggaggaatcctgtggcctgggagatgaccctcctaggactgatattctgctgtgaaaatcctgagttgaagtctctaaaagcctctaactatagatcctaccaaagagggagtgatgtattgtcccactttagagatgaagaaactaaggctgagagagggatctggcttgcctgaggttacatgggggcagactgggaaccagaaccagggtcttattctttggactcttcctggtgtcccattgcagccaagacccacagttgtgtggggacttgttatgatcgagggctgctaggcagagatgttggctgcttcctgggccctggcaagtcactttctctttctgagatgcctttaccccgtctagaaaatgagggacttggagtcatggattattaagggcccttgtgggattcagaaacactagatgtaaaatattcagccaatttgagcagtatggtctaggttgctctgggagggatcagaagccatcttaaagccagggtaaatggtgtgtttatgattagctcaggagcttcccagaaccctcagaggcggggctgtggaatcagcagggggactggccctcagaactgcagtctgaacatctagttctggaaggagcttgctttttacatatgaactgtgcactcacacaaggcacacagaaactgctctcagagctgagaatattttcccaaacagtaagaggcccctccttgaagccatctctccttggaaaggggagctcctccagatgggcctgggctgcagccagcagctgaaattgccagcaacaagcccagaggaaagtgcttcaaggctggagatgcaggtgacaggcctcagccctccctctgtctgtgtcaactaacttcctgggtctcattcagtccctggttctctgctagccttgggcttccttcactgtctccccctactatcccccaggtcagaggaaaccgagagctggcctccagcctcatcccggggtagatgtgggccccctcctccccccaccacacactggaaagggggtacagtttccatttcctggtgagagctgcacagttgtaccaaggggcccctggttgccagggaaacagcaaggtttcctgaagctgagctgagctgagctgcatttgcaggcagatccgtcctctgccttccactcccaaccccatatgatgactgtcctcagctgactgcagcttggggaactcataatcagccagtgaagacacagaggcaaacacgacagaggccctgtcctcaacttcccaccagcacagtaaatatcaccatttactaagaacaggtcttgtgcctggcctcttatgtgctgcctttgacataacttaggtcttatcctccaacaaccctacaaagcagaaaagggaaagcttcagttttgtgcttgagatcaccttgaactcaaaaatgagcaataagcccacggtcacatggctaagattttccctaagtcttgggggaacagggaatatgtggagaactggaaggcattgagctgaaatgtctccatgatttctactctcctagttctgttccttttaggtcttactgggtaaatctgattgactttgttatgtttacttttttttttttttttgagtcagagtctcactctgttgcctagcctggagtgcagtggtgccatctctgctcactgcaacctctgcctcccagctcaagcgattcacctgcctcggcctcctgactagctgggactacaggcacacaccatcacacctggctaatttttgtattttttcgtagagacggggtttcgcatgttggccaggctggtctcaaacttctggccccaggtggtccttgccgcttggcctcccaaagtgctgggattacaggcatgagccactgctcctggcctctgttatgttcacttttaaaaagcaatacatagacattgttaaaagagatcaggccaggcttggtggctcacgcctataatcccagcactttgagagactgaggagggcagatcacaagggcaggagttcgagaccagcctggccaacatggtgaaacccatctctactaaaaatacgaaaattagccaggtgtggtgccgtgcacctgtaatcccagctactcaggaggctgaggcaggagaatcgcttgaacccgggaggtggaggttgcagggagctgagattgcgccactgcactccagcctgggtaacagagcgagactccatctcaaaaaaaagagatcaaattgcccagacctgcttaaagtggaaagtagtggtcctttgtttctcttctccttctcttaagaagattgttaaactttcatctgttgccctcctgagtgctcattagccagctccctacctgcttctcttatacttcccaaatcagttacatctctttttgcatttatttttacgtatcatatctttgttccttcactgtagaccctgtctcctgatatcctccacccgcattccttatccattttcaatgagatatgtgtcctgttttcctgtgtgttcctgtctttttttttttttttttttttttgagacagggcttgccctgtcacccaggctggagtgcagtggtgcaaccttggctcactgcagcctccacctcctgagttcaagcaatcctctcgcctcagcctcccaagtagctgggactataggcatgtgccaccatgtccagctattttttttttatttttttttaatagagatcgggtctcactatgttacctaggctggtctcgaactcctgggctcaaattatcctcccacctcagcttcccaaagtgccagaattataggcatgagctaccacgaccagcctgaaaaatccagtctttacagtggcctcaggcaccggtctcagatcctacatcctaccacaccactccctgctaccacaccagccacactgagctcgtggtggttcctcacttgcaccaccccgcggtgtgccccagtcacactcgtgagatcctctgacccctccacctgggactacaccccttgtcactttcctgaccaagccttgtcttttctctgtagttcttatctcagcctgatgagtgcatttgttattcattcccattacagcataagctctagagaaacagaatttaaaaaattgctcatatttctgcatgcacagtgcccagagcaatgcctgactaggataggcgctaaatgagtgcatactcacttgttcaggaatgacagtccttcagatattgcagcaggtggttggaagcactttgagtcctatctgcaggcggtcaagctctgggttctgaagccatccttgttgacttgaaaagggggcatgcatggtgcagatagtatagactctgggatctagaaattgttgaattcagttctaagctgtgtgatcttggctcatttattgcgatgctccagcctcagtttcctctctataaaaaaggagaatctgatgtgtggaaggatttctgagagtagtaactgagacggtgctgagacaggtaccctgcctagtgtggaggagtcaaggggtcagtggtgggtcagtgccatgcccgccctcccttggggatccgcgtccctttcccatactgctgtgaatgtctggacaccatctagtctgtccattgtcttctgaaaaaaatgtgattggccttgagctgggtcattgggtctgatttaacctgaagggctgggggcagctggaaaacagcagagggaggaaatgtaagggaaagaaaggggatggttagagttggggggaatctcacatgctgtctttcttctctacagtggattctgctgcgaaccggagaccatggccaaaccagcacaggtaaggggcctctctttcctgaaggtggtactcagccttctctgggcctgggatcctcctggagccactaggcctgctacagagacccctggtaccttcagcttgaaaaaaggaggaaaggttcttaggctttgcttgctcctgttacaagtcatggctcttcagatgcaggtcaccataatgtaatataacccacaatatcctaagcagaaaaggatgtgtattggcttatctgacagagaggcccagggcttcaggtctggttgaatccaggggtttccaaatgatagtgtcaagattctgcctgtgtgagctgggcttcttccggtggcttcattcttgggtaggttcttccttgcattggcatggtagtcatcagcagctccaggcttccattctgctgtcttggcagcccagggagaaaacaacataactcatgcccagtgattccaggggaaggcccaggtctggttctcattggctgtgcctgagtaacctgttctttcttggagcaaggaggtggagttggtcccacctgaactgtttggcctgacgaagggaaatggatacttgacaggtagaaagacatccttgttgacttctctgctctggatatagaaatgttctctgtcacacccatttgggattgaatttccttggcttgggagactctaacctcagtctctcatgtctgactgttctgccgggcaatagaattggaggcacctgagaacttttactcccatgtggctgagactaggttctggccatggtcagaggtaggattctgacctcgactgtgctctgttgaggctgggcacggtgactctcacctataatcccagcactttgggaggctgaagtgagcagatcacttgagcgcaggatttcgacaccagcctggacaatatggcagaaccctgtctctagaaaaaatacaaaggtggcatgtacttgtagtcccagctgcttaggaggctaaggtgggaaactcacctgatcccaggagattgaggctgtgatgagctgagatcatgccactgcactccagcctgggctacagagcaagtctcaaaaaacaaaaaaccccactctactctgttggggtttgcctgagggtgctgtctgttggctggcgttggagaaagccatgcagtcagtgtgacgatgggattggcagggagaagaaacttggggatcttgaagaaaatcatgggactgggccccgttgtcccttactccaacccagaactactggccacagaatgcacagacagaagctgtctgtgaggtctttgggcctcatgttccccttacggaatggttgaattcagtaataataaaactccatccatccttgacatcatgactgcccccagtgaacctgggcttataggatattcacagtttctgaagagcacaggatgttataggatcagtaccctcagagaagtcctagctgtggccttcctcacagccactgaggagtatactgtgtgtacaagtggcctctctgaccaggaggagaaaatgttactgattatgggcaaaaatccaaggtggaactttcactgttccccatttcctatgtgtagtcatactagagctacttcctgaaaggcatttgaactgcaggattctagatgatccaagtggacaggccaggccctggaagatcagagaggccaggacctagggtgcagatctttggaccttggtccagtgctcctgggccatgccttctgcctggctgatctgtggtttcttgttgccatggactagggttcagtagacctcctgcaagtgagtcccagggtggcagggccttagggaaccctcctcctatgggatgagttggcaccctccatgcacagtgttctggtggggcagtaaaggagctctggggcatgcaggagggcaccccacctaggttgaggagagaggggaggctgcctagggagagctactcaggggaggaacaagggggctcagagtggtctaggcagggacaactgggacagaggctagaaggagagcaaatgcagcgtgctcaggggagtaaaagtaatttggtatgcttggggtgcagtggtttgggggagaggtgagggttgcagaagacaataacagagaaatgtgaaaaaagcctccctgccgttgagctgcagttgttccttccagttattagctcggctttcaattattagcttgaatctggtgtcctccaaaactccaacacacgcacacatgcatgcatgtatacacacgtgtgcatgcacacagcaaactgctccgtcttctctggcctagacaccccccagttccttccactgtggttattgtgctgttctccctatctctccttttggaagaggagaacttgaggcccaaagacatgaagaagtaggatggtgccatggaagacccaggaggcatggcgctgtggcctccatttcacagggacgttctgggtttgaatgcaataatgaacataaaaacaccttgaggacagggcaggataggcaggtgcttgtgcctgggacttctaggagctgtggaggtgagacctaggtcagcaccggccaaggcagctctcagctggagtcctggccatgtacctgtctctctggggacatcatctctgctcccaagaggccactaggactcctgctccagcagcagcctgggtggggcccagccccacagagccccagggcccggctgctcaccagctggcaccaggacctgctgaatatttcagggtggaaagtcccttctctgctgtcccctgccttgatcctgggttcccgcagccgggaacctgtctgccggaggtgtgacaggcagtcagggtggggtgggtgaggagaagcctgtgtggttgcacaggtggcgcttagagatgcagaattcatgaagttggtgtgagaatgacacggtgggaagcctgggcctggatgatttgaggggctgtctctgtatctccaaatgtgactagtgctaagccccccacctttgcttctagtggctatgatcctgtggggtcccaggacaactaatctagtaggtcatcacttggaaggtcttattagtcccgtgcaaagaactgtgcaggagcccgagcttgctgctcaagaagcttgtctctaagtgagcgtttggatcaaggcttgtgtaggtcattaagcacccttcccccagcatggcacttcagccccttctccagacactgctgtgaccacccacattgtatgagggggagaacagtggagggggaggagcagcaataggaaattggggtctgcgtgctgcctcatcctccgcccttcatcctggggacatgcttccctcttctccgcatcccttcccggcagcttacaatcccatgactttagcgactttgggcatctaactgtgagctctgaagaatcagactctatcttaagtacttgtcaccgcccacacacccctgccccagcagacaagttaaaatagtttctagatcccacatatcaaccagacaggtatttgtatgaaatacctgtcacatgaaccatatgaaatctgctgctatttgactgtttttaatctacatacaaggcaagttacatggctcaacgtagtaaagaatgccagatactagggacagggttgtgagtggtcagctgagtttaatgggtaaggaaaaccacactaggatgttagagtcttgcccttacccaggtcctgacttaggtgttgtgcccaggccagcccagcagggctagagctgcccttacaagagtctgaattgtttatccccatcatcttctccagcctcatctctttgccttccccgcttctagtggatgatcttagtgacagccagcatctgctctgagccctgcagactctgggctggctttcccgaatgccccttgcttccctccaggtctttgtcatgtgtctcctctgtgtgatgccttcttcctcttcgccttcccctccctactctactccttggggccagcctgttgctcatccctcaggactcagcttagacgtcacctccagaaagccttctctgatctgcttggaatatattcgcagtcattcatccatccatttatgaaacatattcagtgagtgcttgattgctccaggccctgtacttggtgctagaaatgcgtcagtgagcaagagagacacagtccctgccctcccggaacttcgaaaggaaatatttcctgggtcccatgctgcccttagcatcgtatctgccacactgtcttgtagttgaagctgtcatgtatctctaccagattctgagttcttagtggtccctggtcctaagcatctacttagtagactctcagtaaatgttgcttgcttgcttgattgaatgaatgaatggtagggtagccctagctgccctggaattgtgagtatctgaatgtgagaagcacttaggatgctgtggattggacagcattgctgcctttttatagccttgaatatagggtcgaaatggcatagaggcaaacagcacagggcaataactcaaatgcttcagtattcaaggagaggggcaggctggcatggttgaccaggaggaagcagtgggctatgtggtggttgtcccttcttatctccagctcccacccagatggaatctgaggggaagggagagatggtctgttagaaagagccttggattcccttcccagctgggcctctgacttgctgtgtggtcttgacatgtcacctgccctctctgttctgggtcttctgggacacaagtggtaatagacctaccttcctcatttagttctcagcttgtggttctcaaagtcctttccctctcttattccaagtgagccgtgggagggacatcctatgactgaagtggattggagactggtgctgctgtggattaggacaggttggtcagacaggtggaaggaaaaacagccatgaatcatggcaacaggctagcctgcagagggcccggacagaccctggaggacctgcccctggtggcatctttcaaagcttaatatttccacactggtcccaggaggtcctgacattggagacagcattgctagggatccagtgccagggaggtctcccttcactgtcttccccttcggcgtcctccatctcagagcttgggccgtcatgggtgtctccatccattcatttagcccagtcacagttacttccagcctgtatgccaagcctgtgctagagctggggctccacggttcttcttaggcagaatgatttgtcttattcacgacagtctccattctccatggactcaataactgagtgggaagctgaactaaaaggtctttaaggatcgttgcaaagaaataattttgagcctctgaaccttcttgtttcctttttttttttttgagacagagtcagtctcattctgtcgcccaggctggaatgcagtgatgcgatctgagctcactacaacctctgcctcccaggttcaagtgattctcctgacccagcctcctgagtagctgagattacaggtgcctgccaccatgcctggctaatttttgtatttttagctgaaacagggtttcattacattggccaggctggtctctgactccctacctcaagtggtctcccgtctagcctcccaaagtgctgggattacaggcatgagccactgtgcccaggcacctcttgtttctccatccatcctagtagctaatattgcctgctgtgcttttttgatatcgctggactggaggtgtccagaaagaaagagaaaaggatttagaagtgaaattcctggaggaccccagttgtttcgtgttcttgttcattttattcatgtggcaaatacttgagtatttggtcaatctctgtgcagtgggcagatggatctggtatctgctctcagaggtttctggatcaaactgcccaccggggtggagaaggcagcaggaatttctcaagctccggccgtgaggtctgaagtaaggccaaggggagcgctggcagtaaagcccccatcctgcgctcactgagctccttgcaaggcgccctgctctgggtattcggcatgtgttactctttaagtctctgcccaggggcgtgatcaggttgcaggggattcccaggtggcaggaagagagctgtgttcctttctggtcagaactttaaatagtaactccacgccgacgcatgcatacctcagaggagccagcctctgcagacagagaccagagagcatccagaggcctggccggggtcctgcagtgcagacgttgggaggcacggagacggggagagggggaggcggtccaggactcactctgctccacctctgactccttgaaggcaagatctgtgtggcccaccctccattccctcttttttggattctttcctgatttcccgcagctggatcagcctctgctgttttcccacattaccttatttttgtcttaatgtatttactacaagctttatagtaattgatgtgcttgtctgtctctgccactgggccaggagctcgtgaaagacaggaattgggtcccctttctccccaattcctcagccattagtgtagggcctagcacaaatgaagtgccttgtcactgtgctgtgtgctcggtgacaggctctggcatcctccactctgccagctctcagctgctctcccagaccccccacttttcagtgccatgtaactgacccacatctgacttctctgtgaaccagtcccattgtgcattcaggttcaggttcgatgtctaagatcccctggctctctgccgcttctctccttcccctcaaagaccaagccagcttgtcctcagatgccagttcacagcgcagtttactgggcccagaggggcagtgccttgtcttggcattgaaatgagagtgtctctgggccccctgtgcccaggaccccaccctcagtagctggcacctgcaaggttcctggagctggagagcagagcggggctggagagcagagggaaaaggtctgagttctgtgtgacctcccacaagtggctcttctttgggcttggcttctgtgatagaaataatcttaagagcgtctacaaatggctacactaatgacattcacagaggtgaaagtgtaaacataaaatgccataaaaatatgaggggctggctgggtgcactggttcatgcctgtaatcccagcactttgggaggccaatgtgggaggactgcttgaggccaggcattcaaaactagccagggcaatagagtgagaccccatctcttaaaatatatatatatatatatatatatatatttgactcttgctattcttgcagggatcattttcatctcctatactcagccaggcttttttaccctctcctggatgctttggaaggtggtgcagggctgcaggccttggccaagcccccctcccttggggaaatggcactgtcctttgggcgggttgcagcaggtggtatgggaaagtcatccacaccgctccccagggtgtatgtggccagcactggattttgcagggaaagcagctcagcctggaccagggtaggcatctgacctgaggttggggctgggagcttggtctcagtccggggttggcagctcaccctctacttttttctccacagggtgccaagtaccggggctccatccatgacttcccaggctttgaccccaaccaggatgccgaggctctgtacactgccatgaagggctttggtgggtgccaggcttcatgggagcttgaggggtatcccccaaaagtagacacagcccagagcccttctggtggtggtggtagggtctgtgaaatggtgaagtgcacttattcatttttttggtctcctctttttattaattttcatgatgttataataaaatgtttcagaaaaaaagtataaagaataatagaaatttcacccatagatttaccaccaaatttaagaactagtgcttcattagcatagttgaagtttccttggtagatccccctcctgataatgccgcccgctgcctttgcccagaggcagccacaatccgaaggtggtgcttatgttcttctttgtcttgtggtggaaagaaccctgtactgggtgttaggatacctgggttttctaagccaggttcattgtgagaccttggacaagttcttgcccctctctgggccttaatttcctgatttgtgcagtgaggagctggatcaggggccttctgagcacagatattgtgtgtgctgtgtccactttcagtcgtgacttaataaatccccatgaccctctgccctgacaccagcacctgatgagtggaaggctcatgctgaggcctgcagggagctactaggcctgtgtccagggaaggaagtggccctggtgggcttcctggaggcagggtgggtaggatgatgattgctctcccctattccaggcagtgacaaggaggccatactggacataatcacctcacggagcaacaggcagaggcaggaggtctgccagagctacaagtccctctacggcaaggtaaccacagcaaccggagggcccatggggtgcgggtggaagaatgatttcattcacctgtgtgctcgttcaggttatttcctggatatggcactccaggttagcctgtgggctgacaccttaccctgctctttttcttctcatcagctgggcgtctttcagcctttaatacacccacagcacctgctgtatgctgggctcgtgctaggtgttagggctgcactagtgaataagatgggtgaggtgtcaactctgtggactgccagatagtgagagagatacacagtaaacgaggaaacagacagtggtggggaagtggcacagggctgtggacctgaccctgcatagccgtttgctagcagcatgacatggagtaagacctctgttgtttctgagcctgtctcttagggttggtaacagtacatacctccaagggtgatgatttaatgagattacttagcccagcacctgccagagtaagtgctcattaagtgtaattcttaccgttgtaactactcttcctctttcctcttctatctcctcttcttccccacctgccaggacctcattgctgatttaaagtatgaattgacgggcaagtttgaacggttgattgtgggcctgatgaggccacctgcctattgtgatgccaaagaaattaaagatgccatctcggtaagaagtgggggtgtatgtggtgttggggtggggatgtggttaatgggaagattctgggctcttccaaaagcaactggtgagccccatacccacccagcacatgtgtcctgcttcaaagacacatctaaatttatcccagaggagcatcccgatccgcacacagagagatgcagacagatgtcaacatgatgcagacccccttaccaggagcttgtagtccaaggatacaggttatagggacatggagacaaattgtgtccaacactcctgaggccaagggcacactaaaggtaatcaacatgaccctgggccaagggttgtttgagagggcatcttaaaggataataggatcaagttaagccccaaagcccagagaggatttggtggatagcagtgtcaaggtcattgcagggtgtaaaaatggcaggagaagttgtggatctgtgtttagggtatgaagagtagttcagcccggttgaggtagaggtagagaattgccccctaggaaaaagagaggcaaagccctttaagtgtatctagcactttacagtctataaagtgctatgatctttgtcttctatgagctattaagcatgaattcattttataaactgatgcacttagcaatgtgagattattatcttctcaatctccctgtgagtttggcagagcaactaatatcatctacattttacagatgagaaaactgaggcccaaaaagatagtttctgaagagaattcacaaagctggaggaggcagaactagaacctttgtgttttagtccattctcacatcgctataaagaaacacctgagattgggtaatttataaagaaaagaggttgaattggctcatggttctgcaggctgaacaggaagcattgtggcttctgcttccggggaggcctcaagaagcttccagtcttggcagaaggcaaagagggagcaggcatctcacatggtgggagcaggagcaaggcgggaggtggggaagtgctacatacttttaaacaaccagatctcacaagaacttacgatcgtgagaacagtagcaaggagatggtgctaactattcatgagaaaccgcccccatgatccaaccacctcccaccaggccccacttccaacattcaggtctacgattcgacatgagatttggtggggaaacacatccaaatcatatgaccatgtcttatgagtctcaaggcaggagttcccaatcagtgcctaagagctgggtaggaacctcctgagtcctggggtgtcatagctctggccactccctgatcccaacctgtgtccagtgacctcccatccctgcccttaattcatgcgctctttttctacccccagggcattggcactgatgagaagtgcctcattgagatcttggcttcccggaccaatgagcagatgcaccagctggtggcagcatacaaagatggtgagatgggcaggaggggccgcttaggatcttcagatacaaaatgaggatgattgcaacagtggggacactaagattctagccatctaccttctctcctcctttcctctgatccatttgtccacccatttatctacccaataagtacttgctctgtgctgggtgatgtgctaggttctcgggataaaaccaaaggggtccctctctcttaggccaatgagataatgagataatgaaggagacacacaataaacaggtgaacagataaacacagtgatgatggattttagctaagtgttgtacaggaaataaggtaacaagaatcaaacttttaccagtgaggtcttgggaggaaatgaggaaccaatcgtataaagaatggagagaagatccttccaacagaggtcacggcaagtgcaaaggccctgaaatagaaatgagcctggtagccggtacaaggctagacaggtagaggacagggcaggatcacacagggcctgcaggccaagagagagatggtgttttattctgagtctaatgagaagttggggagtatgatgatcagatatgggttttaagacagccatccttgttgccgtgggttggaaaggaattgagaatagaggaggagagaaccatcggaaagctgtagccactgtccaggtgggccgtcatggtataggtgggctagagagaatgaacagattccatttcatcatatcatggtcagtacgaagagctgtgaaaatataccctgggtcttgccatgatggacgtgtagactgggttttggaattcttaaaaatatctgatcattttgggggcagcagggccctttatcctagatccctgaggtctctggggatgagactagagcttgcgttcctttctgcagcctacgagcgggacctggaggctgacatcatcggcgacacctctggccacttccagaagatgcttgtggtcctgctccaggttggttcacagcctatttttttcctctggagcttgggatagcttttgtctggctcatctgggtgtagatctgaatgtccagggtctggtcagcttcccctggtttgcacaggcaggtgtatttggctaatcctctttctctttggcacacagtcctctcgtgcccaggagtgtcttctgctgtgattttcttcctctctccacactcgctcctcccgctcctctctgggcctccttcctgccattgcttctgcagctgcacatgcagcatttctggaccccagcattcctgtggctactgtgtggagtctcccacatccgagccttattgcctcctcaccgcccgcccaaagtatatcacaaagagactattaggaggctacaaattggtgtctgtggctgaattcaacctgccaagttggattttttgtttgttttcccataaaatgtgttttaagaaagaaagcaaaacaagtttgagttagttgctaacatttaaaaattgtgagattttgctcaaaaaccagatttctggattattttaatgtattgaaagttgcggtagcagcagacctgcattctgcacgactgcagtgggctggagagcatatgcgtcctgcccgtttcaccgtgaatgttatctacctggctctgtaggtatctctgtgaccacaggcacgatgggaacaggcattgagatgtctcaagctcagctccaaggaccaaatggttatgaaactttatatataaattaagccaccactatgtttcctcgttcccccatttcccttttataccagctcctcccaactctgttcctctcattgccataacaatcccatattaaccagctggggaatgatcaggagaaacctcaggagtgggacagtgtgacctgtgccccattttcaaagctgcttgttctggagaggagtgtcctatccctgtatcttggagtcaagcgttttgtatcctcaaggtttgacaccaagcagcagcgcggcacacattgtaagcttgccagctctgtcttctgctcagtcccaaagagaaccctgggggtttgagatcctggaatgcacaatccagggggaagaggggatggccatagacctctccaggccacctgcagacctctgcccacgtaagaaggagttgagtactgctcgcccctcttccctttgtgcatcctcctatgtgtaagcttcctctatcagatgaggcaaagggcatgggcagaacaacagaagcaccattaggatttggtgactttgtagcttgtgagctcagatcttgggacctgagtcccaaatccttattggtgaattctttaagttaaggtataagagctcctaatagaatgcaaatgttcagatcctttgcccctgtggaatcgttgctggaggagtgtcatgggccatgcaggatctgtggcagggaccctcgagaacctggggccctgtcctcagagaggtcctcagggcaaggctctgcctacctctgggctggggacacctggaagaaccttggttgttcttgggactctcctgtgtggacccagccctgacgaggaagggaaaggccagagggagggtcccttttgattggctcacaaaatagatactgtggtcttcatgcaatagcagtcactgcttctggacacatctgggccaccagggttttcctgctttccctgtctccaccactggcatccaggcctccctcctgactttgcagtgtttgaaacacatgttctttgtctttctgcccagggaaccagggaggaggatgacgtagtgagcgaggacctggtacaacaggatgtccaggtaaacaagcaccactgaaagtccctgaggcacagcagaagagccttgggaggggagaggttggggccctgggaagggctggaggtgaagtcatttgcatcaaataccagaaataacccagccacagctgtcatgtataccggtgctttgttgaagaaaagatataagttatctttcaaaggtatatcccatatgtaatattggtatattggtgaggtgtactttggagctttctttattcattcagtttttagatattattgaagtaaaatacctagcatgtgctaggcactctgccaagcatttagaaatcactaatgaacaaaatcaagtggtaccgggagagacaggcatacattaatcacacaaacaccttctctatcaatatactgtacattgcaggtgttttgagtacccagtacatgccagcagcactacaggggctgatacagagaatgctatgacatagtccctgttgttgaggagctcatgcaatagtgtggagatagacaggtgaagaaatcattatcatatacagtagatcaaagtgataaagaagtagaaagctatgggagcctaggagagggaggaaaggagggaaatagaactgtgcctgggggcatcgggaagtactttgagaaaaaaatggaatacttaatctgggccttgaaggttgagtaggagtttctccagaaagaaaggaagaaaggcatataggtatagtcatgtaccacataatggtgttttggttaatgatggaccacatatatgatgctagtcccataagattatggaccagatatgtgatgctagtcctataagattataaccccatattttcactgtgccttttctatgattatttatgtttggatacacaaattcttgccattgtgttgcagttgcctacagtattcggtaagataacacgctgaacaggtaggtgtgccgcctaggagcaataggctataccacggagtctgggtgtgtagtaggctatgccatctaggtgtgtgcgagtgctctatgatcacacaatggcaaagtcgcctaacaatggcagttctcagaatgtatccccatcattaaatgatgcatgactgttttatttgcaaaggtcttcaggctaccaattactcgtgtgttcagggatcaggcagcagttctgagtggcttggtcagtgtgtcctgtctcctgaggtttcctctttcagtcaagtgccacctcttccccttcaggacctatacgaggcaggggaactgaaatggggaacagatgaagcccagttcatttacatcttgggaaatcgcagcaagcagcatcttcggttgggtaagctccagagaagacctgaagctgctcccttgggttgatgccaataatgcctttctttatctcttttcttttctttaccactaatggaacatgatacctacttcattcccaacccaaactttagtcctgagtttattaggttggtgcaaaagtaactgcggtttttgccgtttttaaaggaatggcaaaaaccgcaattacttttgcaccaacctaatatcagacagcagtttgtatagtccctcagcaaagtcattaacaggatgcttggccttccatctcagtgccagtcctgtctccatgttaggggatgagacacagtctctcaccagctatgaagctcatctgcacagcgctggtgatgtgcgtgacctcccagtcgcctccatcatagcaccagccctagcttcatggtggacagtcgtcctggccactgtgcccccctgctcttgaagtcctcatttcttctcgggggtacagaggcactctcaaacctccctgtctctctgtctgacgcagtgttcgatgagtatctgaagaccacagggaagccgattgaagccagcatccgaggggagctgtctggggactttgagaagctaatgctggccgtaggtatgtcctgacgttgcattcctgggggctttaggggattctggaacactggcctaggaacaaggggctgagaatggaaaggggaattacatggtatagaattgggaaggagaaaaccatgtgggccgtgaattctaaaggtttctccagggcagcatggctgaggctggggacgggaagggggtttgagcctcaggtactgacttcctccagctcccttctccaccactggcagggggacaaagagctctgaacttgggttgaggataatgatgatcataatagttgacttttgttgagcatctagtgcatgccaggcactgtgctgagtgtgtaatctttaaaaaagacccagcagtggccactgccatgatctctatttcacagatgaggaaactgagtctcaccaggctgatcatttcctgaggggtagttttgtaatgagttgggggtactgagaacgtgaggatgtgaggaactggctagtcagtggtggagccaagattcaaaccagggcttctcccacatgggcttggagcaagtcacttctgcttgctggacctcagtttcctcatctgttaagtggggtgcagggtgtgggggcaggaaggatggactgccttaattgcctccccagaagcccttccaattctggcattccagcagttagcatgtctgagtcagggatatgttgtgtgtttgtatttcttgggggaaacctgcagctcctttatcgtccctcccagagccatcccctgccctccctgtttgaagtagtcagccagtgggactcacggtgattcagtgggattcacaatgattcagctgccagtacctttctggtgtagcaggtctaaaaaacaccttttcctccttcgccccagaccctacccccaccccagctcaattccctgttaaaaccaaaaggactagaaagataaaggcggtctttgtgatggacttcaaaaggattatttcaacaagattatttcctgtttattccctgggtgtgcggtaaaagtgggttggtctggggtgatctggggctgtgagctatcaggaacggtggttcttcctgtattgagctaggtggccctcaaggaatagaaacaaagagggagtcaggccatcccatcccccttctgaggcagccagaataactctacctcttcctccctcttcacagtgaagtgtatccggagcaccccggaatattttgctgaaaggctcttcaaggctatgaaggtgcgtggtggggctgatgtgaatggggtttggggagaggactattgggagtctttgacaagtccttgggatccagtggccaaagagagcccttcagggatggccacaggactgaccctggtgaaggtgctctgtcgcaggtgagctgtagagccaggaatgctgctggtcacatgtcctgccacctgcatacctgcctgacgtcatgagtcaacagatgaacttagggtggcagcctgcacctgatccctccagccaaatgggttggcggctcggactttgaagaagtattaaccagaatgtttttatacagcgtatgtaggcaagaccactttggccttgcctgctaagactcatgatgctcaccctgtgacagttccactctgggtgtgtttctgagaaagcttcccaggcttttacacatatgacgcacaaagaaactggtatttttgtgatgcactggaggaaatgaatgcagttatttgctgccagaggcctgaggcccgagacacaggagcttgggcctttctggccctggttggccattccgaaaggacaaagtagactgtcggccattctctgcccaccagtgtgccataatgaggttgggcagctcagccctagagagatgtttgcctgtatgcatgaattcattaagaatgcccatcacaaggctgagtgcatgcagtggctcacacctatgatcccagcactctgggaggccaaagtgggaggatcacttgaggcccaaagttcaagaccagcctgggcaacatagtaagacccttgtctctacaaaaataacaaatagaactagccagggactgtggcacatacctgtagtcctaactactcgggaggctgaggcaggaggatttcttgagcacagggcccctgggtttgaggcttcagtgaacgcagtgctatgtgatcacgccactgtactctagcctggacaacagagtgagaccctgcctcttcaaaaaaaaaagaaaaagaaaaaaaaaacttataacagtattgcttatattaggaaaaagctagaaacaacccagtgaccatcaggaatagtacagcaaaaacctaaatgcacagtggtatatttgcagagttccaaaatgtgtaaatctaagtgtattgcttagagttacaaagctatggtaaaattataaggaaaatcaagtgtggaaattatacatgaagagagaagaggtttataacagtgagagggccgggcatggtggctcatgtgtgtaatcgtagcattttgggaggccaaggcagcccttgaggccagttcaagaccagcctggccaacatggcaaaaccccatctctactaaaaatacaaaaattagccaggcgtagtggtgggtacctgtactcccagctgctcaggaagctgaggcaggagaattgcttgagtctggaaggcagaggttgtagtgagctgagatcgtaccactgcactccagcctggacaagagtgagacactgtctcagaaacaaacaaacaaacaaacaaacaaacaaaacagtaagaggagcatagagagagcttcaatgggaatggcaatgtctgcttcttttgctctaaattttaactttttattatgaaaataggattttcaactaagctgggagctatcagcactctagcctcctctcaagtccatgttccccaaacccacttgtcttgcagggcctggggactcgggacaacaccctgatccgcatcatggtctcccgtagtgagttggacatgctcgacattcgggagatcttccggaccaagtatgagaagtccctctacagcatgatcaaggtcagcagagctcatgggggcagagaagggagcaaagagctttttgccaagacagagggcttggggactattcccaggaaaaggaaatgtcctaggaagtgggagtctcttggacattccaggagctcctgccttgtggctcattcaaggaatttaaggatattcaacagaaaagcaagtgttaggggtgtttgtgagtggtaaggctacagaaggaggcaggggctgggtcatgaaggacacgcaagctgaattaagtgcgaggactctgccccaagggcagtgatagttcagtctcctggaagaaggctgggaaacactgaagaacacaaatgagggttaaaggggaacctttggcctgggccgggtgattggtgatgactctgggacatccggcccctgaggctttatcaggagacatatgtaaagctaggggttttccctttttttttttttttttggatgactgaaataaaactttatggggtgacagagaaagagatccaagttgtattctccaaagtatgtttccaaagggtaatttttttaggtgttatgtgcaaaatgttctatgggaaaataagtttgtaacaaaccacaataagcaaagataaataagccagtttctttacctcagaacttctcacagcctttcacattttgaagtccattatgaagccccaagagggatatggaatatgcatctatacggatatgtgcatctgtgtaatatatatttgtttgatttttttgcatttcccaatatttttgctcatggaaccccatttccatgcatatttcatgtggaaggactgggctggggactgtctggtggcagtgctgtgctggggcactggcttgaaagggcagcgagcatctcttctcaactccgcatattggtagcaaagtcatattggtaacttgaaattgtccattgctagaagtatttacaccacagaaataggcaaatgctataaattagggcttcctccaacctgcccgctgagaaccagttattcaatattaaccagcacaggagggccagggctgctatgaataagtgttcattcagccttcccctctttcaggctgtgcagaaccttcacctccttgtctgagaggagcccagggctgggtgagaggtaacctttctttctttctcttcagaatgacacctctggcgagtacaagaagactctgctgaagctgtctgggggagatgatgagtaagtggcttcttggcccctggctggagggcatggccttggggtgccaggcggggactctcctggctcgcatcctgatgggtggattggatgagctggggattcccctgagccaggagcgtcgcacaagtgaaaggcggcttttgctggtagctgctgtgcttgtgggtctgtgtgtctgagagtgtgggggtctgaacgtgagcgtggtctcctgtatatggagatgtctgctcttgtgaacttggaaagtcagtctggggttgtggactaggaaccagaatatgagcatccaatccctgctatttcatagccatttctcggtttcatcacctgttaaatgggaaaaggacacattcctgctctgcctactcatttatgcagcatatttgtgttaagtgccttctgggtgcagaccctgtgaggaagcccctgatgaaggccacagcgcagaagggtatagaccagtttccagaagggagcagtcctgtgctggggagaactggctgtgccacatagaaagcatatataaaagcacacagagatgccctagcccagaccaaggggagactctttggagatacacggtgagacccaaggaggaaggggaagagccaggtgaagagggtctggggacagtgtttgggtggaggaaatcacctatagaaaagccgaggagtgagaaggagtggcctgattcattcatatgtccgaagtcatgcatttatggagtactagagagagaaataaggcagagaagtgggagggcctgggggcctcttcccagaatgttaaattgggacattacttgaccagatttgtgtttgagaaagggaacaggctgcgctctgatttcctttctctggatcttataaagatccaattacagaagggatgcaagaatttcctgtgaacctttggtaaggaccataggggttgatgcagttcagcagatattactgagctcctgatgcatccaggcactttgcaggaggagatgcagggctggcatggccatagcttgctcaatggcctctttgagaggggagagttggatagaagccattcaaattctaaggaagaaaggggaggctgaaggattggaaaaatcctatcctgcttggactctgcagccaggaaggctgcccttaaaagccagcattggccggacacagtggctcagcgcctgtaatcccagcactttgggaggctgaggcgggcggatcacctgaggtcaggagttcaagaccagcctggccaacatggcgaaaccccatctctactaaaaatacaagaattagccaggcgtgatggcgggtgcctgtaatcctagctacttgggagactgaggcaggagaatcgcttgaacctgggaggcagaggttgcagtgagctgagatcgagccactgcaccccagcctgggtgacaagagcaaaactccgtctcaaataaaaataaaaaataaaaaaggcagcattgcagggggtctcaagagatggaaggttctcagaaatggagggaggactctggcgaatggaggaggcataggctggagagaaagaaagcttaatgtgtgtgtggtgtgtgcacgtgtgtgtatgtgttggggtgtgtgtgtgtgtgtgtgtgtgtgtgttggtgtgagtgttgcccatgatgacattccttcctgtcctctccctaaacccctccattccagtgctgctggccagttcttcccggaggcagcgcaggtggcctatcagatgtgggaacttagtgcagtggcccgagtagaggtcagaccttcccctcctcctgcttgacctcttgaccacagcttctctgcttgcaccttcctgctgctctggttggcacccagctgccccctggcggccaacccgacacgttgattctcacatctgaagcttccttttctcccttggagtggtgaactggtggaggggcgcacctggtttctgcattagcttctgacacgctggaaagggttctggcccacttactaacagggcttgctgaaatggagacctggctggttccatggaggggcctgtcccgtctggagtcgaaacagttggcctcagagacatgaaagctgagaacagatgggcatccctgggtgcactggaggatttcaggttgtcctcctgagcatcctcagactgggggtccacaaaggacaggaatgaaaggtttcactaaagtactttaggcaaaccattccagagactgcaacacttggtccacacaaaaaagcatgggaccttggagctctctgttacttattcgctatgtaacctttggaaggtgccccctccctctgggcctctatgtctccatctttaaagtgaggggttaacatggcaatctcggtgatctcttagggctcttgagctctgatgttctaggacagtgttccccaaatgataaggcaagagatctttgcagatgattgtaggtgatgtgagaagtgaatttagtttggcagggttgaataacgctgaactccacagagtgaatgagaaaggcactcctttccaatttcatcagcgtttctgattacgtcaaagaggaagtcttggtttggtgccgccgtctctgcaacacttgctgattttcctttttcacaaagagaaagctgagagagctcgctttaagtttcagagcttctggcaagtagaggcatcatgttaaatttcatggtatatcacctcttttgtttttattatgttgatttttgtggtaaattgtcagtttatgatacatggtatcaacttcctaattcatggtagttatataaaattaatttcatccattcctttttttttttttttttttgagacagggtctcactctgttatccaggctggagtacagtggcatgatcatggctcactgccacctccccaggctcaggtgatccttccacttagcttcccaagtagctgggacctcaggtggacaccaccacacctggctaatttgtgtagagacagggtttcaccatgttgcctgggctcatcttgaaccaatgggctcaagcgatcctcctgccttggcctcccaaagtgctgagattacaggcatgagccattgtgccaagcctcattaatccacttaacaattattttttgagtgtgcctattatgtcagacactgttgtaggcacctgggatatgtaacaggataaaacggatacaattccttgccttttgggagtaattttaaatgcacttcaaaaattgatgcatttaagtagacagaaaagaagttgaattacataaaaccattaagagatggcatagtgtgtgtgctaatttggaatagtgaaagtcctttaggagtgactgaaatttgggaaactctgttctggtatttcagaacttttctgctgccttttcagggggaatgactctttaagaggcagagggggcctcgggggcagggtaggattcagaagaattggggatgccccggtggaataagcagccaaggggcactagaaccgaggcagatcccgtggcaggcgggagcctagccaatttctcttgatcaggacttgccctgctcccagccctgagtccctctctccctctctctatatctttctgtctctttctctctctctctctctctctctctcagctctcgtgcagggtctgtctgctgtggcttcacctctgcctctttccccacccacgccgcttggtttgggctcatggggtgagcttcccaccctcgcatgctgtctttcagcctggtccccaggggggccttcagacacctgctgagtctctttctgcttctcacagctgaagggaactgtgcgcccagccaatgacttcaaccctgacgcagatgccaaagcgctgcggaaagccatgaagggactcggtatgggggatgggaagggagcagggttggtctccagggcagcaggtgtggtgggtttggccgtgggctggcaggggatggagtgaggtttcaaattagagtctgcaggatgaggaaggcttgatctcaagtttccaccctcctagctcccagagtatagagaggaggggcaggagagggttcataaggaacttggcagaagccctttccagggaccaaggtgtcccccagcctcctggaagcagtatcctggcactgaagaaagtaccaggtcacaaaattggcatggtgccctggctctgctgctgactcaccgtgtgactctgggtgagcctctccgccactctgggtctgaatttccctatgtgtaaaatcagggctgtggaccctggaacccaagagccctccctcattctgtggtgggagtgtgccctgctgggcaggtctttcagacctatatttggcaccagtgggaagagtactgcacccacaggttcagatcagctgggcctgtgctcagaaagtccagcctgggacaggccatctagggtttggctttctttgcctttctgccccatctgtctgacagcaactcccaggaggctttaggttaagtccatcaccctcctgagcctcctttccatgtgtctcatgggaatgatgatacctgccaagctcgcctgggactgtaggatgctagaggtaaaaatgccatgaaagacccctgtgctgggtctgtggttgatggcattaatctgagaagcaggaagtgatattctaatgccttccagagtcaacctgctgtggttagagggactcagggtccagcttccagagagctgaagagaaaggacatagagttgctaacaggacttggactgtcagggttggaaggatcccttggtgactactccagcctcttcatgttacagatgtggaaaccaagtcccatcaagggaaggggacttgcccagggtgggcagccattgccagagccagaactagaactcagaggcactgactcccaacccagtgctctctacctcccagctgtcctttttcctcagcgtgtcaaaaggaaagggagggaggagtccagcagaaatcagtggcctgagccataggcaagcggactgcagggactcaggagcacatggccgcttagccaggcttctaccctgacaaagatcgatgaggggccatcagtgggcggtgcatggggaaagccgagagccacaggccttcttctgaggcatgtggctttggtgactcagggactgacgaagacacaatcatcgatatcatcacgcaccgcagcaatgtccagcggcagcagatccggcagaccttcaagtctcactttggccgggtaaggacctcctcctgggctctctgtgcaacatgcatgcaccttgcctgattgagctcagcctgtccccatcggttctgcacagttgggcaccagggtcttcatggcagagggaccctgtgtggtcatatgatctcagagtgtctccagcactgggtttgggcagacatatctttccatgcccccagttccttgtgatgggcaacacttgtgtgagttgctcagtggactcagaggcacagcatggggccaagatcagggctatgagttgttttcagtgtgctttgggcatcttgcaattcctctgcacagacagagctggcttcaaggccccaactgagtgtcagggattattgcacattggtggcatctggcttaggttgatgcatttccccctgagtggaaacagtgtccttcagctctgctgccttcccgttcctgtctcctgtgtcaaggagagtgggtcttcctcctggttgttttttccctaccctctttggcttcatctaaataataagtacaacatcagcaaagacagacacaagcttccatgatccctcatgtggaacccctgttttctctttccatctctcccatcctgagtcatgtgtgggcaagtgctgatgttggcatgactgtggctctgccctttgcaggacttaatgactgacctgaagtctgagatctctggagacctggcaaggctgattctggggctcatgatgccaccggcccattacgatgccaagcagttgaagaaggccatggaggtacagtgtggcaccagggggtctagtgtctgcgggtgccaatagggatacaggtgatcctcataagcccaggtggattagctgtaacttcttggtagaactcctcccatactcagttcaaactggcataaacacaaaaggagatgttggctcctataactgaaaactacaggactagctctgagtccagagactcaaatgatgttctgtggacccttggctcacccctgtcttggctctgctgtcctcccttctggcttcactctcaggcagcctttctcctcatggtggcatatgtccatcccgccagctagcggctccagcagaaagagttccttcttcctaggagctccaacaacaggcttggcatttactccaagttgattcagcttaagtcacatgcccactggtgtcagaagggtctcatggagccgctggaggaagtggggtgggtctcgaacgaaagcaccagcagttggagtctgtactccagcctagacctgccactcactcacagtgtgactgggccattccttacacttcccaatcctctgtgccttcatctgggaaatggaaatggtcacctctgcccttcaaactaggacaggtcaatcaaggtcacaggtatgaagggcattgttaactccgaagacctgaccctacattaaacaagaaagcattatgtcctggcccagaagttgctagaactgctttgcttcccaaggtaccaattgtactaatggctactgtttataaagagcatatggtaactctcccaggttaggtacattagttcaattagttgcctcctcaagccacaaggcagggctcttattttgtccccattttacagatgaggaaactgagacttggaggttaagttgcttggtcatggtcatagagctatgaagtagcaaagctgaggttcagaccagtctttctgactctagagcctgtcttgacaaccgcataaaaccagtagtgcttttggccccttgcgcattaagaggagggcagcaatggggagctagaggactttataaaaacattgcctaggctaagcagattgagatgattgtttcttaaaatacctaagccaaaaagcaaacgatctaaagacacagggttcagaaatagaagagatcgatgaggtaacccaactgaatcctttccattttcaaagtttccaagtgggaaacagagaggctcagagagtcagtgagttagggggagacgagggctagacccagtctcaggactttcttgattgcctcaccacacacctgcttctaacaaagaaatgattgaagatctcaatcaggatgaatctcctaggatctgagaaggcaggaccattagagcactaggcagtaacctctttgaggacagagaacatgtcttgcctcttgcctttctctttttttttttgagacggagtctcgctctttcgcccaggctggagtgcagtggtgtgatctcggttcactgcaacctccacctcccaggttcaagcgattctcctgcctcagcctcctgagtagctgggattacaggcgcacgccaccacgaccagctaatttttttgtctttctagtagagaaggggtttcaccatgtttgccagcgtggtcttgaactcctgacctcaagtgatctgccctcttcagcttcctaaagtgctgggattacaggtgtgagccaccacgcccggacttttttttttttttttttgtagttgtagccccagcaccttgcacagtggctagcacataataggtgtcttaacaagtacctgaatgagtgaattagtcattgactcattcagtcaatcaatcagtcaatcttgcctgcctcctctcctccctgatagtttccctgcttccctgtgtgcagatctttgcatgacaggtccccagcctgccttagtccagggcatgtaacgcctcagttcataaatcactcctcaaatccaagagtaaacaaatgtaagccagccatgatggctcacgtctgtattcctaaaactttgggcttgagtccaggagttccagaccagcctggacaatatggtgaagccctgtctctacaaaaaatacaaaaattagccaagcatggtggcatgcttctgtggccccagctacttgggaggctgaagtaggagaatcacctgagtctgggaggcggaggttgcagtgagccgtaatcatgccactgcactccagcctgggcgacagagcaagactctgtctcaaaagaaaaaaaatttagcattttatcttaagcacaaaactttttttcttctaacaaaataatacatgttcactgtggagacttgaagaaatagagtaaaaaagaagaaaatagcaatcatctgtgatccttcactcacacagagaccaaactgctagttaacactgtgaggcatgtgcgtgtccttctgttctcttccaatacttacaagtagaaatttctattcagatgttcatgtgtatatgtggtgttatacacacacgcctatataccttttctgtttggggggctggaaggcaaagcagttcacatgggaggttctggggatcttgagaggctggcatagtcagccttggttgtgccaaggtcttgggcctgagggccatgtctggaggtgaggagaaaatccaggaatgcttggcctgagctttagccgtccgggccccatggacctctgcacaggaggtcagaactatggctgagatcatctttgccttgacattccagggagccggcacagatgaaaaggctcttattgaaatcctggccactcggaccaatgctgaaatccgggccatcaatgaggcctataaggagggtgagtttgggaggcctgggcccagatgctgggagaacagccaggccccccaacttccaaccccagcccacagctctgcccaggactctggcctgtctcctttccctcagtccttgaggatttgataagcctcttgggtgtgcccatccctgtgtctggggaaaagacaggtgtcctggtaggacaaaggcctggaggtagaaaagggcttggctggaagtgggaacagagaacattctggcctgctggagagagggagggcgactctaggggtgtgtagtccatgcagttctacagggccccacagccagaagggccccacacttggttgcaagctatgctgtcactgtccagaaattcttcatttttaagcgagtggccccatattttcattctgaagaatcttgagtaccagtcaaaaatgtttaaatcggctaggtgcagtggctcacacctgtaatcccagcactttgggagtctcaggcaggcggattgcttgagcccaggacttcgagaccagcctgggcgacatggcaaaaccccgtctctacaaaaaatataaaaattggctgggtgcggtggttcacccctgtaatcccagcactttgggaggccgagatggtggatcccttgaggtcagaagttcaagaccaacttggctaacatggtgagaccccgtctctactaaaaatgcaaaaattagccaggcgtggtggcatgcgcctgtagccccagctacttaggaggctgaggcaggaggatcacttgaacctgggaagcagaggttgcagtgagccgatatcacgccactgcactccaacctgggagacagaatgagactccatctcaaaaaaaacaaaaaacaaaaaaattagctaagtgtggtggcatgtgcctatagtcccagctactcaggagactgaggtgggaggatcacctgagcccagggaggtcgaggctgtagtgagccttgatcatgccaactgcactccagcctgggtgacagagtgagaccctgtcttgaaaaaaaaaaaaaaagtttacattttttatcttataagcagctttaaaatggcagaatttttgagtacaggagtgacatagtcagagctctgcttttgggtttagcaactgccatgcaggagggaaggtagaagagagaatgacaacagggaggtgacttaagaggctgttaaatattaaaggcgagatgcaatgggacctcaactgggacagagctgaggggatggaggggagatgatgggttgatgggaatgcccattgtcttacaaaatcagcaggaggatggctggatgcccccatgagccagttacaaaccctttcatccccacctccccctgccaatactgccctggctcaagcctgagtttcctggacctccctccccgcaaccaaatccttcttggccagcagctacccacaccccctttctctgcctcagactatcacaagtccctggaggatgctctgagctcagacacatctggccacttcaggaggatcctcatttctctggccacggtgagtgaattcatgggccccaggtcggcttgcccatcgggaggcctgggaggaagggaaggtttactgagtggagggcacaggggagttagaagtgcactcctgatggagagggggtgtctccccacttgcctccttagagttccaccgcctacccctgttgttcccttgtcaaagttggcgtggtaccaccttctccagacagtcctccctggtggcccttgtcctggcttgttgggcccccagctcacaggacaaagccatatgggtgaccctctcctgtgttgttacctgggagcttctgtcaccatctcttgaattcccataaccaaaatggcagaccctcattgacagttaccgagagcttgctgtgtgtcaggcattggtgctaagtgtcttgcacacattctcagttaatgaccacaacagcctaccttatagaggcaggattttcgtccctgtgtagctgatgaggaagagcattcagagaggtgaaaatgagcagggtgtgtggtggtacagagatggagatgggtcgatgtttggggactgaactttcttgctgctcctgctgcaggggcatcgtgaggagggaggagaaaacctggaccaggcacgggaagatgcccaggtaagacccccagcccaccccagtcacctctgccgggtgtccctgagatgtaggtccagcttatgcgtgtctacgccgggccctgtctgtgagtgaaggctcctggcaggggcgtggttggtttgattggttgatacttagactgtagaaatgaggtttagaagtgtggtgctggtattactggcatttcctaggtgaatagcaggaccctcagagctggcagggacctgcagatcacccaggtcaaagccctcatgttacagtgggaaaatggaggtccagaaagggcaaatgacttctgaaagtcacacagcaaatcagtggccccagtagaattgacccctagagagctggtctgggaacttgctgagaagagggcctgagtgctaaaggcctcggtttattatctgtaaaatgggaccgagattggagggagtgtcctgggacgagcctagaaagtaagttcctcaagggctggaatcttcattttgttcactgatatatccaaagtaacacatgatcagtgctcaataaatatttgttgaatgaatagcagggaaaagggttctctaggagtctcttggctgctctgcctcagccctgctccttagcctagtgagcttgaggtctggaaatggcttcttctggaggttggacaaccccaaattcattttccctgagggttctatggctgggcagtccctactgaggccagtgcattgtcccccactgacctgcaccttgatcccagcacccagtagcctgacccaggtccatgtctccatctcttctgactgcctcattttcccgcccccaaaagctgtgtccagggatgtggggcacagacaccacagacttttatagacatccagcccccttcttttatagttggtgagttgaaaagagcactgatggattgagagtcagggaaccaacttttctgttcccaggtcccataacagaagtgtggtttgctacaacagcatctgagctagaaaaatctttagctggaacctgacagttacagaattgtaattataatttttagaatgcatactatatattgagaacgatgccaagattattctatacgtttttatgttctccctttttactagaagaaaatgaagctccttaacctcttcaatgaaagaatttctaagtggtggtggttttatttgaactcaggcttgcctgatgccagagtctatgcttaattccatttacagtaatatcttccaagacccagtagagttaaggtcccctgcagcttccacatcaaatagctgttgttgtccagttgtccaacccttgctttggaatatggttgtcaaaagctgcagggttacatttaaatgtatggcatttcagctacattgtgggcacatggatgggggttaggctgagaacccagccagacactagggtggcttgctgaggccacatttcattcactcattcaacagacgtttattaagtattactgtgaacagcctcgtgtgctgctgagagttttttaaaaatctcagctctcaccccaaatccatcctccaaccctgaattgatcttccagggaatgcttctgcctggtgcctggtttgccaatgaggctgtgcttccaattgccgctagcagggggcagtggtgggccttgctgacagctgcttcgcaaaaggagagaagtggagagagagaacccgggtggaaatagctaagggacccttgagcgagatccctgcccaactcggctgcttctccagatttaggatgctagacccaagctcattttcttataactagcagtacattcttttatagaaactagaaaataaggagaagccaaaaaagactccataacctaatagtaataagcattgtcagtattgtggcatacattattctagttgcttctctatgtatatataaaagtggattctttatttctgacagttaaaaattaatactatgtgaatattgttgcatttttaaatcaacgatatcatttaatggctatatactgttccatatctgaatctaccatgttatttaaccagccttcttcctagtagcaaactcttttatcacattcatgaattattcattagaatgaatttccagagatgaaatggaaatgtgggagcaaaatgtatataaaaattaagggcatttgatagggccgagtcaagctcccccttagataacgcacatgagtacttggcagtttgtatttgcctgttttacactgcctccctggcggtctctcactctggatgtctagaacaccctcaagctcttagaagtctgggactgttattaaccagttgaacatatgtccaatttccaactgtggccccacagtgattgttaattgcttcccctttcactctgttgtccaattagagcaataaattataaataattattatagacctaccatgaaatgaaggattgtggtcatttttagataatcaatactcagacttttttttttttttttttttttttttttttttaagacggagtctcgctctgttgcccaggctggagtgcggtggcgcaatcttggctcactgcaacgtctgcctcctgggttcaagcaattctcctgcctcagactcccaagtagctgggattacaagctcccaacaccatgcccagctaatttttttgtatttttagtagagacaggatttcatcatgttggccaggctggttatgaactcctgacctcaagtgatccgcccgcctcagcctcccaaagtgctaggattacaggcgtgagccaccatgcctggcccaggcttttaaaaatataacagctttcttgaaatagaattcatttaccccactattgacccatttaaagtgtacaatttggtggtttttagtatcttcacagacttaatgcaaccatcaccacaatcaattttagaacattttttcacccccaaaagaaactccatacacattagctgtgactcctcatatcctactaaccccccagccctaagcaaccactaatctactttctgtctctccagatgtgcctcttccaaacacctcatgtcaatacagtgatattaatacgtggccttttggactggcttcttcacttaagaaaacactaacctaaacactatgttaaacacttaacagtgttttcacgggtcatccgtgttgtagcatgttggtactcccttttcattgccaaataatagtctattatccattcatcagctgatggacatttgggttatttccaccttttggctattatgactaatgctgctctaaacatttgtgtacaagtttttgtgtgcacatatgttttcatttctcttagatagaattgctgggtcatatgagaactctaagtttaaccatttgaggaactgtccagattaatttttgcatgaagtagctaggctaataagaacaagcttttgtggtgaatattaatttagtgtcccaccactttttttttacattacagatattattatcttaaagatgctttgaaaaaccgagtatgtctagggtactctgacccgcgtaagtgagaacaattgggactttggattcttttctgttaaattttttaaacatgtccctctctctctctttttaaaaatgataccgttttatttagcataagtttttacaaatttttgataaaatacatatcaactttaccatattaatcattttatatatttatttattttgagatggagttttcctcttgttgcccaggctggagtgcagtgttgcaatttggctcactacaacctccacctcccggattcaagtgattctcctgcctcaccctcctgagtagctgggattacaggcacctgccaccacacccggctaattttttgtatttttagtagagacagggtttcaccatgttggccagactggtctcaaactcctgacctcaggtgatcaacctgcctcagcctcccaaagtgctgagattacaggcgtgagccatcatgcctggccaatcattttaaagtatacagttcagtggcattaagtacattcacattgttgggcagctgtcaccaccagccacctccaaaactgttttcgtcatgcaaaaccaaaactctggacccactcaacagtcactccccattctcccttcccccagcccctggcaaccaccattctttctatgtctgtgaatttgactggggacttcatgtaagtgaaattatacagtatttatgcttttatgactggctttctttacctagtatgatgtcctcagggttcaactaggtttttgttttgtgatgtttgagatagggttgagacccaggttggagtgcagtggcacaatcttggctcactgcaacctccaccttctaggcccaagcaatcctcccacctcagccccccaagtagctgggaataacggcgtgcgccaccatgctcagctaattttttggtagagtagggtttctccacgttatcccggctggtctcaaactcataggctcaagtgatcctcccaccttggcttcccaatgtcctgggattacaggtgtgagctactgtgcctggcataggttgtttttaatacagaaaaatattttaaaaaccagaagcagcccataatcctagtagccttgataactcttatttaacatttaaatttaaaatgaaataatatctttgcatctttaagaaattttcaggaagaataaaaaaaatgcgaaagctttccctcatagtccctctcctcaaaggtgtctcgacagtttcttaagtacttcccaggaagtatgagaaagtgagtgtctatttttttttgaatctagataaaagaaacactatattacacaaaaatatgctatactttacttctttacttaatttaaatggaaactctccttatcagcattgtagataatcttatcctttgtaaaaactgcatggattgtttccattgattggataagtcatagcctgtttaacaagtcaatctcaggatggtttacagtttttctctagtatgaaaaatgctgaccaggtgcagtgcctataatcccagcactttgggaggctgaggcgggtggattacctaaggtcaggagttcgagaccagcctggccaccatggcaataccccatctctactaaaaatacaaaaaaaaaaaaattaactgggctggtggcatgcacatgtaatcccagctactcaggaggctgaggcaggagaatcgcttgaacctgggaggtggaggttgcagtgagctgagatcgcaccactgcactctttgggaggccaaggcaggaggattgcttgaggctagactggacaacaaagtgagaccccttctctacaaaaaataaaaaaattagctggatgtggtggcacacacctgtagtcccagctactcaggaggctgaggcaggagaatcgcttgagcccaggaggtcaaggttgcagtgagccgagattgtgccaatgtactccagcctgggcaacagagcaagaccctgtctccaaaaattaaaaagaatgctgcagtgaacagtcttgtattctatcgtggaaggcttttgccagtatacctgtagggcaaattcctagcaatataattgcttgatcaaatggcatatgccttttaacttttaacggacattgccaattatgcaatgaaaagaagaggaaggtttccagagtataggctattgtgaagtttataaagagttcagtctatccaatagaataaagtcagcagagtttctgggggaacggcgaaagcaatacgcagcctaggtacatgagcctgggtattttgttcccaggctctccaagtcacagctatttgcctaacaaaatagtgtcctaaccacagaattttgtgctctgcatagtgcagtgattaaaagtaacccttgtaaaatgactttcccatcactgtttgctgtgtgcctccaggcaggtcagctccccttaaggcctcagctggccagtctttcctgtctgtaacatgaaggctaaaattacatgtctcttgccttggaactctgaatatgctaaagggtgcagagaactttgcactgctcacatttacatctcagtggttctgtaaggaagtggcagggattatttccactttcagacaaagaaacaggcctggaatctcctctgggttttggggtgcgaagggcagagttccccatttctgtgtctttctcttacccttcaagtgaacacgtttttagttattgccaggcctatccgcattctgagctccagcccaaaaggtcataggaaggtatttttatcttgtccctaccccccttcctttcgcatcccgggttctctcaggtctcttgggacctctcccactcccagccaggcccctcaccctgcaccccagggccccagcaccagcctccccaacctcctctgactcttgcctcccttctctccctcctctctcccctccctgctctcaggtggctgctgagatcttggtgagtgtcctgttcttcatttgggttttaacggcctctgagtaaagtccgcctttactgggccgagcggggcagtatcgagcagtgatttgggagcttgctgtgcggcttctctctctccccttccgggccctgcttggtaaaagataggccaggcaagtgtttcccaaacttcagctaatcatctctggcacgatttgtgctgtgtaaccaccagctattaatactgatctttaaatcgactcactcttaaacccaaaatgagttaaggggaatttactatcagtataaatagaactagtagctagctagaagacaatcatggaaacactaatgtgcagtgtgatcgggtgtgtttgcccttgaccccgcttggggaaacactggccaggccatcttctctgcatatgaccccatacacccttcccagaggggcttgcagaaaggttgagggatggaaggggaactcccagttgctatgctcagagtctatgtgggtcctcctaggagccccagccccacggtcctgaggctaggatggaagtacccagtgctaaggccatctttgtcagttcacagggtccttgtgaactggagaggggagtatagaagccattgtgcttgaggaaggaagaggggaccagtctcggcccccttggatggctgggtgagcccagcttctgactgccctcagcccaggcaaagacatgaaagtgaataataaccaaggctttctcatgtctcccctcccaaatccttgctccaactggggctctgcaggaaatagcagacacacctagtggagacaaaacttccttggagacacgtttcatgacgatcctgtgtacccggagctatccgcacctccggagaggtgaggcctgacctcctcccttcccagctcagcaggaagatcccagaatctgatgagagcctctcagctctctgtggcaagaggagcccgttgcccacccacctcctccttaacccagcagtagcgtgtcatgggtgacggcgactctggagccctgggttctagtcctggctctaccacttatacctcaccttctttctcctccttagggaagcaggtgggatgcccgggattaggtatagcaactggatttcacctcaaaggccaactctgattggtagtagctgcctagagtgctgtgttaaggattctggggtcccgcgtcatgattcactggcgatgcctgccaggagcaaggcagcgagaggtggtggtggcacaagacccacatagacatctttgaaccacaggctgccgcatgctcagggcacacctgtatgcagtggccctggcactcggtaatcatgaagtgtcctgcactgagacatttacattttaatgtctggcactacattaaatgtctacatttaatgtctggcacttctcagtatttaaggtgctttaacatagtggctaaaagaatggacttgggcactggacggccttgatttgaatcccccacttaacagccatgtgacctcaggcaagtcaccgaatctctgcgcctgagctcccttacgtaggaatcagggttttagctctacccgagatgattgttgtgaagatacaaaaaacataacacacataaagcactggcgcaatgcctgactcagtgagtgtttcctgagtgttatcattgtgtcttcatcccaagcggacacaggaggaagaggaggcccaggaaggagagggatcacccaaggtccctcagtgagctggggcagaaccatgactaggacccgtgctccttttactaccccagcctgggttcccagaacttggccgaggttctaagaccattggccaggcacggggactggcgtgggacagatttggctctgagcccacggcagccttgatgtcagagcttctctatcgggatgatcttgcccaatgcatttaggcctgggctgtggccatatttgctgcccttccactttctcaggcacagcctgtgggaggcactgggtggggctgaggaggggtcctccgcctcctgcactgaagctcacccccacctctggggcttctcttgtggccagtcttccaggagttcatcaagatgaccaactatgacgtggagcacaccatcaagaaggagatgtctggggatgtcagggatgcatttgtggccattggtaactggcagggactaagggaagggctgggggcactgggaacttgaacagattctctggaagaatagaaccttggcagcctccgaagctactactggaaagtaaacactgtcacagttcgcctccaggggtgctgccaaatgtgtgattgtgcaggaatgtcatgaggtctgtgcgaggctgcaggagagggtgagaaaataactgttgctagggaagaaccaggaagactggggcaggcaggggagggggcacgctgtcctgcacaactagggtgtatacacacacacaccacacacacacttgacacacacacctaacatatacaagacacatactatacacacacacattctcacatgtgacacacactcatacataaaacacgttacatatgcatgtgacaggtgcacaccacacatacacacatcacacacagaacacattatatatacacatacatgctacacccccacaagacactacacctacacacacaccactcacacactatgcacacatgacccatgcacaccacatatacgcagcacacatgcacacacatacaagacacatacacgctagatgcagatgacacacacacagaccctcgtctcctctcagtacctggctttttggttacgcttatataatttgagctcttgactttgaaaaggtttttcccttttggatcttaattccaccgtgtataaatatggatgagtggatatgggttagggctgaagttattctcattaatattcatcattagtggtatcttgtttcatttactataaaacacattgcatcaatgcacttttaaaaaatcttaccaagaggtatccgtggaagattttcacataattgccttcaattataaaacacatcttgatttcagagacactaaaatgtgggggaaaggtgtgttagatttgggtgaagtagaggtggtggtaggggtgttgtttagcacgtgatgggcctttaccacccaggagcaatatctaggaggcgggatagcccgacgaataaaagcatggaatccaggttgaatccctgctctgccacttactcactatatgtccttgggcaggtcacaaaacctctgtgtctcaatttcctcctttgtaaagtggagataacaacagtgcccagcccatagggtggattttgtgaggctgaaattagttaattatatgtaaagcacttggaacggtgcctcttggcatgtaatactcactggacaagggttagtttgtatttgtattgttgtttcccaccaagccctgcgcaaagttagttgcacgcaggtttagttacattctcatcaggtgctcttaaccagcttattttacaaaagaggacactgagttcagagaggcttatagcagtagaaccaggactcaaaccacaggctgcctacctccaaagctcatgttcttaacaccagaataattagcctttggagacactttcagattcctaccctcctcgtgtatttccctcttccctttctcctcccaccttgaacaggtatacacgtgcaaacacacaccacaacacaccatttcacactcctccatccaatggcaggcatcggggtcccatgtgacagatggacaggctcagtttttaggaagacttgtggggttggttacagaggagagaagtttctgcccagcgtgcttcttagccagactgataaagccctaggtctgaagtcagggaaggcttcctggaggtgatgtcatgactgggggcatggacatcaagtacagccttgaaggatgggatttgatttagagagataatgtagtgaagggcagataggaaatgcatctatccaggaaggacagagagacacaggaatttgcagtttgttctgggaatgggggagcaagggccatgaggttgcaaaggaggccaggagctttgacattcaagccaaggagcttgggatttgtttgggaggtagtagggagatatgtaaggagctggagatgggaggtgtgtgatgtgatcttttccacagggttcctgagcctgttgcagaggagtcttgcttgactctgccactggggtacgcaactccagcctcttgccgtctgttctcattatatccagagtcattccagctatagtactggtgtctggttcctcctttttaagctgtctgagacacctgtgcgtgggctctggagccttgcagtcaagcagctgtgaagggctagagaaccctaggctttgagaaagggcggggttggtgaaaccaggcaggcattatctgcagccagggtagggagcaggggctgccaatcctgcaagattgttcaggccctggggaaacactcagccccagggatttgcatggtcccttaaattttaccaacggacagtcattctttggagcaatatttctctaaatcagtaactctcaagcattaggctgcaccagagtagggtggccaaccatcctgatttgcgcaaggctttcagtgctgttaggttggtgcaaaagtcattgcagttttgccattgaaagtgatggcaaaaattgtaattactttggcaccaacctaataaaacctggagtgtcccaggcaaactaggacaagctggtcactcacctctagagtttcagattcagcatctctggaatctggaatctgaggcatgagaatctgcctttcttccaagttttcaagtgatgctaatgttgttggtccggaaaccacactttgagaaccactgctcaaaatctttccaaaatctgaatctttagggtggagcctaaaccctgagttttaaacaagctttttgggtgattccaatgcatttaaaaatttgaggccccgtgccttgggttcatgaggagttaattacctttgaatcctctcctgaccttggttagctgtaagcaccttagaaggaagagagttgcaaccaattgagagccaggcctaaggatgggccagaggaggaagcatggggaaggggagcaaaggtgtcgtctgagcatgaccctggggttgacaatgatctgcagacccatgcagggatagacgaggtggggagatgggggaggccggtccagagtctgggttcacagcctctgaccacgttccccgcatctctctgctcttcctaccagttcaaagtgtcaagaacaagcctctcttctttgccgacaaactttacaaatccatgaaggtaagaaaacatgctggcgttcctttcccttcaagcactgacttacatacacacacaaacacacagatgtgcaccatcccccagatcaggattcctggcagctgtttcttcccatttgacatttattagcatctgcccttgtctggctctaggatggtatttcccagttgggggtgatttcccccgccttcccccgccccggaggatatttggcaatatccagacacatttttggtcatcacaacttggagattgttgctaccagcatctggtggggacagaacagggatgctgttaaacaacctcagtgcaaaggataagcttgcgcaacaaagaattatccagccccaaatgccaaggttgagaaatgtgctctggaggcacacagggctgggtaggacacagtctctgccctctcagagctcacaatctatccggggacacagggtctcctaggacaaatagtcatcaaaggtcacaagcgctcccctctgagtctagtcctgcccttctgggagagcccaagccacactggccaccctctcagccactggagtctcaactgcagatagcctgggcaggtgggagggtaggaaggaacctgagaccctcaccctacagtctccaaatgtgacagccattcattgagcactcacgatgtgtcaagcctgtgccaagggcttcatctctctgaccacagctgaccctcatggcagtcctgtgaaattgtggtagcatcctcatttgatagaggaggaaactcaggcctaggtagggtaaaacgttgcccacatttacatagctcctaagaggcagagctgggactcgaacctagctctgactcctaggctggtgcttgtcgctccctgggggcagaggcagctctggctgcccacacattccatgccctgtgcctgctccttgggcccggtggtagtttcctagggctggtgtaacacattccagaaattgggtgacaaaagaaatttattctcatagttctggaggccaaaagcccaaaatcaaggtgtcgcctgggttgggtcctcctggaggctctgggggagaagcactcccctgcctctcctagcttctggtggttgccagaagtccttggtgtttcctggctgtgaatgcatcactccggtctctgcctctgtcctcacctagccacttttctgtgtgtatgtctgtgccctccctcttctaaagatattggttattggtttaggcttcaatctaattcagtatgccttcatcttaactaattacatgtgcaaataccttatttccaaattacatcatgttctgagtttccaggtggacatggggacactattcaacccacacacatcttttttgcgtgtcagtctggccagtcctgggcacagagggattttggtcaggactgtttgcagaagacagaggtggaacatccgccctgtttttggaaggaacaagggagaaaggcagatgggataccactgtttcttgcctgactgggctctatctctccttccgcctgtgtctccctcctgcctggctccaccagggtgctggcacagatgagaagactctgaccaggatcatggtatcccgcagtgagattgacctgctcaacatccggagggaattcattgagaaatatgacaagtctctccaccaagccattgaggtaaggggaggggctagaggttagcaggaagcgggtgagtgtcagatccctaatataagattagaagtctttattcccatggacttttttccagtgggttaccgcttagaacagccaggatattgaaatgaaagggggtctgtattgcattgtttataccgaaatcaattccaaaagaatcaaaggtttataattaaagatttccaaataaaacaagagcccattttttgctttttttaaagcaatgttatggaagtataacttacatatcatgggcaggcatggtggctcacacctgtaatcacagcacgttggaaggccaaggcaggtggatcacttgaggtcaggagttcaagaccagcctggccaacatggtgaaaccctgtctctactaaaaatacaaaaattagctgggtgtgttggctcatgcctgtaatcccagctactcaggaggctgaggcaagagaatcgcttgaacccaggaggtagaggttgcagtgagctgagatcacgccactgcactccagcctgggcaacagagcaagactccatctcaaaaacagacaaacaaacaaacgaaaaacttacatatcataaaattcacctgttttaagggtacaattcaacagtttttagtaaatttactgagttgtacaaccattcccataatgcagctggtttccaaacacttctatcatcccactaagctctctcatacctgtttatctagttccatccccagccataggcaaccaccaagctactttgtgtctctgtagatttgccttttctgaatatttcatataaatggaatcacctaatatgtgaccctttgtgtctgactttttgtttgtttgtttgtttttgagacggagtcttgctctgtcgcccaggctggagtgcagcagtgccatctcatctcactgcaacgtccacctcctgggtttaagcaattctcctgcctcagcctcccgagtagctgggactgcaggcatgcatcactatgcctggctaatttttgtatttttagtacagacagggtttcactgtgttggccaggctggttgctagctcctgacctcaagtgatccacctgccttggcctcccaaagtgctgggattacaggtgtgagccaccacacctggctgcgtctgacttttttgacatatggagcttatatttttgctctttgagatcagccaagatcttaaagtctgatgcttggttctacttggctaacgagactatgggcatctcagaggcagtctcttacagacttagtaggaatgtaagtaaattgttggcacattttgatactatattatgttttaaaatcatacatcaaaaaatacaaggacaaacaaaatcccgaaaaccatgtctcataacaatgataggagtccctcagaagggagatccataccataccatgggtcaggaagtttggcctccccagtctgaacgtataccagaccactgtgatgtgtggtgagcgtgatggtgtttgtacccattcccagcaatggcttggcagttagcactcaatgttgtttgttcaaataagaaatcacctaacacgatatgccaagggccatgggggagggtatcagcagagtgccaggggaaccaagggaggccagagttcactgtgcctcctgacgcaagagagtggccagagtgcttctcagaggagagggccctgctggcaaatgggattgggggtgcacaggggcatgttggacaggggagtgacaggtggagagaggactgagatgctcctgggggaaaggaacaggtgaagctgcagagctctgcacaggtcagatcccaaagggccttgaagccaggccgggagcttgcatatcttcctggggataaacaaaagggacgtggtcacatttatgtgtctgggagatcccagtagcctacatgtggcatgggatcctatgttggtcatggagagaagccgagggagatgtccagacagatgggcagccgggaggagggggcattgagactggaaggactgttttcactcactctgctctctgcctctgccagggtgacacctccggagacttcctgaaggccttgctggctctctgtggtggtgaggactagggccacagctttggcgggcacttctgccaagaaatggttatcagcaccagccgccatggccaagcctgattgttccagctccagagactaaggaaggggcaggggtggggggaggggttgggttgggctcttatcttcagtggagcttaggaaacgctcccactcccacgggccatcgagggcccagcacggctgagcggctgaaaaaccgtagccatagatcctgtccacctccactcccctctgaccctcaggctttcccagcttcctccccttgctacagcctctgccctggtttgggctatgtcagatccaaaaacatcctgaacctctgtctgtaaaatgagtagtgtctgtactttgaatgagggggttggtggcaggggccagttgaatgtgctgggcggggtggtgggaaggatagtaaatgtgctggggcaaactgacaaatcttcccatccatttcaccacccatctccatccaggccgcgctagagtactggaccaggaatttggatgcctgggttcaaatctgcatctgccatgcacttgtttctgaccttaggccagcccctttccctccctgagtctctattttcttatctacaatgagacagttggacaaaaaaatcttggcttcccttctaacattaacttcctaaagtatgcctccgattcattcccttgacactttttatttctaaggaagaaataaaaagagatacacaaacacataaacaca

SEQ ID NO: 48 - DNA, 38958 bp, Homo sapiens
  source 1..38958: mol_type = genomic DNA
atcttgcgggagaccgggttgggctgtgacgctgctgctggggtcaggtgaggagcggcgcccccctccctttcccacctcgtctgcctcggtggtcttgccctcggccagctctgggcgctgctgtcccggtgctagtggggcgcggctggagggcagtgtgggcctcccggatggcggcgactcggtttgcgcgtctcgtagccgggctgccggccggggtgtgttggggtggcgtgggtgaggcggccggcctggcttacgggaagcccttccgtccgtttggaaatcccagggaccagtggcgccccgccctcgggcaggtggaggggctgaggccggagcgtggcccagctgcctcgcgggaggctgagtagggaaacgcacgggcagtgctgaaagccgtctggctggtagtggctgtactttccggtgacacagcgaatttagggaaacttggggaaatttttactgtgtttagtgaaccgtaggacagaatgcgccaggccaaggtcgtacactggttctcgtttacagttcttggaagctattctagaatagcattccagatttgattgctgttccccgaccagcagcaaatctgtgttgaaattagctcatcctgtgcaaacactgcgcaaggaaaccaaggtgcagaggtagatggctgatgtccaccgtaaagtgacagacatgacgctgttgtcttccgactgccgtaaacgccctgatttttgccagctgatggccagctaatctgctaaatgtgtccgaattagatgatgagtgtaatgagttaccttccaggcaaggaaagagtttcaagcactgaataggtaaaagagataattttggccactgcaaactttcagtccttttcagtgaggactgtctttcagtcctcactggtggttggctacctacctgtccgtgcagaggactagccatgcctccatgttctttctccacatcactgacggatttaaatgatcctaccatacctagaagccggttttgcaaaattgtattcgctgttgcgcgtatcttcagtcacccttcctgtttcgtgtattttttcccccataaatttgcaacagctgcctcttgggttcctgggcttcatgccatcaatgagaaacggtgagacccagcccttttactaactgactcactgggtggaggtggtttggaaaaccaaaaatgattttctagtcttttaaaagtgattgctaacagagaatgtttaaaaaaaaaaaaaaaaaagcccgagcgcggtggctcactcctgtaatcctagcactttgggaggccgaggcgagagattcacgaggtcaggaggagtttgagaccagcttgaccaacacggtgaaaccccgtctctacttaaaaatacaaaaattagctgggcgtggtggcgcgcgcctgtaatcccagctactctggaggctgaggcaggagagtcgcttgaacccgggaggcagaggttgcagtgagccaagatcgccactgcactccagcctgggcggcagagagaaactctgtcacaaaaaaaaaaaaaacccaaaaaactctagacttactattcacttgggcaaagttgagaaattttttgagtcactctgggtgttatttagctttttacaaaaacgtttaaaatctgcctcttgaataaatgatatatgtacaattctaaaagggctaaagtacattgaaaagtaagtctcggccgggcgcagtggctgtcgcctgtaatcccagcactttgggaggcctaggcgggaggatcacgaggtcaggagatcgagaccatcctgactaacacggtgaaaccccgtctctactaaaaatacaaaaattagccgggcgtggtggcaggcgcctgtagtcccagctactcaggaggttgaggcacaagaatctcttgaaccccggaggcggaggttgcagtaagctgagatcgtgccactgcactccagcctggcaacagagcgagactccatctcaaaaaaagaaaaaagaaaggtaaatagtcttctccattgtgtcccagctcttcatccaggaagcagtcactgttttctacttccttgagtgtcctttcagggatattctataagtcaaaatcagtgcattttttacacataatggcagcacactatgcagtttttcactttgccttttttttttttcattaatacgtgttatagatggtttcatatatgggtaaaagaaaaagctgcctcatttttaataaccacataacacctccttgtatggctatccataatctgtttcacctgtccctcctttttaaaaatttaagcaatggccccgcacagtggctcacgcctgtaatcccagcactttgggaggccgaggtgggtggatcacctgaggtcaggagttcgagactagcctggccaacatgatgaaaccctgtctgtactaaaaatacaaaatttagccgggtgcggtggcacgtcccagctacacgggaggctgagacaggagaatcgcttgaacctgggaggtggaggttgcaatgagtggagatcacaccactgcactccagcctggatgatagagcaagactccatctccaaaaaaaaagataaaatttcaacagcttttggagtacaagtggttttttgttacatggatgaattatatggtggtgaattctgagattttagtcacccaagtaatgtacattgtacctaatgtgtagtttttgattcctagccccctttcaccctcccctttctgagtctctaaagtccattatatcacttcatacctatgtctttgcatactcatagcttagcttccacttacacagtgagaacatacggcttttggttttccacccctgtattacttcacttagaaaaatggcctccagcttcatccaagttgctgcaaaagacattattttgttccttttaatggctgagtagtattccatggtttatatataccacattttctttatccactcagttgatgggcacttagattggttccacatctttgcagttgtgagttgtgctgctataaatatacatgtgcaaaagtctttttcatataatgactttctttcctttgggtagatacccagcagtggaatttctggattgaatggtagatcttttttagctcttcaaggagtctccatactgttttctgtagaggctgtatagtagtgtaataagcggtctcttttccccacatccacaccaacatctattgttttttgactttttttttttttttttttgagatggagtctcgctctcgttgccaggctggagtgcaatggcgtgatctcagctcaccccaacctccgcctcccggattcaagcaattctcctgactcagcctcccaagtagctgggattacagtcacacgccaccatgcccagctaattttgttatttttggtagagacgggtttctccatgttggtcaggctggtttcaaactcccaacctcaggtgatcgcccgtctgggcctcccaaagtgctgggattacagatgggggctaccgcgcccggcccattttttgactttttaagaataaccattcctgtaggagcacggtggtatctcattgtggttaatttgcatttccctgatgattaatgatgttgaattattaatgattatttcatgttttttggccatttgtgtatcttttgagaaatgtctattcatgtcctttgctcagtttttaatgcaattgtttttttttctttgtgatttgagttccttgtagattctggatactagtcctttgttggatgcatagtttgcaaatattttctcccattctgtgggtggtctgtttactctgttgattatttgttttgctgtgccgaagctttttagtttaattaggtcccatctatttatttttgtttttgttgcgtttgtttttggggtcttagtcatgaattttttgcctaggccagtgtttagaagactgtttccaatgttctagaatttttatagtttcaggtcttatatttaaatcttttatcaacttgagttgatttttgcattggatgatagttagggatccagtttcattcttcatgtggcttgccagttttcccagcatcatttattgaataggatgtccattccccaatttttgtttttgtgtgctttgtcaaagagcagttggctgtatgtatttggctttatttctgagttctctattttgttccattggtctatgtgcctacttttaaaccagtaccatgctgttgtggtagctataggcttgtagtgtatttgaagtctggtaatgtgatgtctccagatttgtctttttgcttagaattgctttggctattcaggctgttttttgttccatattaattttaggattgttttttctaattctgtgaaaaatgatcttggtattttgatgggaatcgcattgaatctgtagattgctttgggcagtatggtcattttcacaatattgattctttcaatccatgagcatgggatgagtttccatttatgtcatctgtgatttctttcagcagtattttgtagttctccttgtagagatctgtcatctccttggtgaagcatattcctaggtattctatttattttttatttttgcagctattataaaagggattgagctcttgatttgattctcagcttggacgtttttggtatatagcagtgctactgatttgtgtacattgattttgtaacctgagactttaccgatttcatttatcaaatctaagagtctgttggagtctttaggatttccttggtatatagtcataatatctgcaaacagtgatagtttgacttcctcttttccaatttggatacactttattgctttcccctactttccctctggctaatacttccagaactatgtcgaataggagtggtgaaagtggatgtccttgtcttgttcctgttctcagggggaatgctttcaacttttccccattcagtatgatgttggctttgtcgtcatatatggcttttattattttgagttaggtcctttctatgcctcatttgttgagttctttattgtaaaggatgctggattttgttgaatgctttttctgcatctgttgagatcatatggtttttgtttttaattctgtttatgtgatacatcacatttattgacttgcatatgttaaatcattccagcatccctgggatgacacctgtcccttattgatggacattcacatggtttttaaccttttcctattacaaaaatgctgcagtgaatagccttgtacatatataattttgtccttgtgcaagtatttctataaggtacattcctggaaatggaattgcattctagtcttttatataattatttttcaaaatgtaccaaaattcactttcttaaaatagctttaatttttattatatacagataatctttgccttattttcatttttgttgacataattcctccaggctcttaaaggtaagatttaagatagtagctaaagaatttagatataggtcttgtcactggaacaatttcttgaaacttagaaatttaaattgcttatgatgtctttggtactgtaactgcatattgcctttcaaattactattaatttatctcataaattattttcagatttttttttcctttattttgaccctgacccttttgcccttggtctatctacttttctttttctttctttttttttttctttttccttgtcttgtcttgtcttttctttcaactggagtgcaatgatgcaaacacgactcactgccgccttgacctcctggcctcaagcaattctcccacctcagcttcctgaatagtttggactacaggtgggcgccgctgcactgggtaatttttaaaatatttttgtagggacgaggtcttactatgttgcccagcatggtctttaactccttggctcaagcagtcctcccaccttggcctcccagagttttgggattataggtgtgagccactgcgcctggcctatctgaccattctttagagcttttgcccctcctttactctttatacaaacccaggcttagaaaagaaaaaagcaaaaaaattcagcctgtccctgtttttatatccagccctttgggatcccaaatgattattttataattgactgggtcagttttcatatcattttatgtttcttattgacttatagccttgattcaatctatgtccgtttattctcaattcagcacatttttagcttctatcctgtgttcctgtcataagggacactatattatctcattttcctatactgtgtactcaaatggctgaatacttaatctttctatcagcacctaggacagtgctcattacacagtggactttcataaatgttgacttgagttgggtttatttggcatctgatataaaagaaatatgaatcatttacagctgtattgatgaaaagtgccaaaacatatatttacaaatttagaaaattaggtgtagatccagaaatcccaaagtattctggtatcagagtgtgaatcacagacctgcagaatccatatcacctgaaagctttagaaatgcagaatctcaggccccatcctggagctactgaattaaaatctctattttaacacgatccctagggattcatatacacattaaagtttgaggccaggtacagtggctcacgcctgtaatcccagcactttgggaggctgaggcaggcagatcacttggggtcaggagtttgtgaccagcctggccaacatggtgaaactccgtctccattaaaaatgcaaaaattaagcaggtgtggtagtgcgcacctgtagtctcagctacttggaatgctaaaggaggagaatcgcttgaacccaggaggtggaggctgcagtgacccgagattgtgccactgcattccagcctgagcaacagagcaagactgtctcaaaaagaaaacattgagaaacactattttagtcaactacgttgttcaaagaaggaagagaggagacttgagctagataggaggggtgagtaagcccaggcttgagggccaagtcagttaatgataagaatggcttaagcaaaggaatgctgggaatggttcaagtgatagagatttcacgttgagggttaggtgttggtaagaaatgagttaaatagataaatagagggtgggtgtggtggctcatgcctgtaatcctagcactttgggaggctgaggcgggtggatctcttgaacccaggagttcaagaccagcctgggcagcatggcgaaaccccgtctttactaaaaatacaaaaaattagccaggtatggttgtgtgcacctgtagtcttagctcttcaggagactgagatgagaggatcatctgagcccaggaattcgaggctacagtgagctgatgtcacactactgcactccagcctgggcgatagagcaagaaaccatctcaaaaatatatgtataataataataattggagccagtactaaggagacctgtatatcaggccaattaattttcatttgatactccagcagtagtcattgatgatttttgagctgaagagcaatttgctgaaagagcagcattttaggaaagtttagctagtgacagtgtctgagaaaattgggagggtgacagagtataagcaagaatataaacagaggaggagttttagtaagacaggcatcaagtgatgaaacttggtctaagtatatgaccatgagaacagaaattacagaagaggcatttcaaaggatggatagaaaaacactggttttggccgggcgcagtggctcatgcctgcgatcccagcaccttgggaggccgaggcggccagatcacctgaggtcaggagttcgagaccagcctggccaacatgacgaaaccctgtctctactaaaatacaataaattagccgggtgtggtggtgggcgcctgtaatcccagttactcaggaggctgaggcaggagaattgcttgaacccaggaggtggaagctgcagtgagccgagattgcaccactgcactccagctggggtgacaagagcgaaactctgtctcaaaaaaaaaaaagaagagaaaaatactgggtttcttactatactggagtattaggtaatttaagtagtggtgctattgacagataaaggatgttaagagtggtgtggtggagaatgacgagtattttattatacacatacagaaagcctcctgattgacttctgtcttaatctgctccttagtctattttggtgatcatccgtctcacagttacgtctcaccttttgccttgcaaataacattgttctactttcttgcctatctgtgtctagcacctttaaaagcctggtttaaacctttgatcattcactctccacttgtagcaatgttttcttgtagatgccaaaaaagtgattactgactttatatagatgtatttgccaggtatattatatctgatcactaatagtattttagatttttttgttgttgttgaaatggagttttgccctatcacccaggctggagtgcagtggtgtgatcttggctcactgcaacctctgcctcctgggttcaagcaattctgcctcagcctcctgagtagctgggcttacaggcacatgccaccacgcctggctaatttttgtatttttagtagagacagggtttcaccatgttggccaggctggtctcgaactcctgacctcagttgatccgcccacctcagcctcccaaagtgctgggtgtattacaggcctgggccactgcacccagccttttttttttttttttgagacagtattgctctgtggcccaggctggagtgcagtggtgcaatcttggctcactgcaacctccacctcctgggttcaaggggttctcctgcctcagccttccaagtagctgggactacaggcacatgccaccacacccggctaattttttggattttttatagagatggggtttcattgtgttagcgtggatggcctcaatgtcctgaccttgtgatctcctcagcctcccaaagtgttgggattacaggcgtgagccaccgcgcccggccctaatttttgtatttttaatagagacagggtttcaccatgttggtcaggctggtctctgacctcaagtgatccacctgcgttggcttccaaagtgctcagattacaggcgtgaactactgcgcctggccgtgttttagatttgatcaggctaagagggtattcttttgaatgtttgtttttttctctgtttatttacatttgctttaggttaatagtgttttcttcaaatgcaaaagatatatatatatatatatatagggatatttgtctttatccacactagctccatttattttacatgagccatcttttcaacaatggacaggagagtgtaatgaatccccatgtactcatcacccagcgtgagcagttatcaactcctgactgcttattatgtctaaattcctgcactatattatatagaatattcctgcatattattttggcataatccctgacatcgtatcgttttgtttgtaaatacttaatgtgtatctctaaaagatcagaatacttgatgaaaatcatagtaccattatcacaccaaaaaaatagtaatgtcttaacatcacttgatgtgcaggttattgtttacttttccaaatggaaatgagcaccttttgaagaacataactttcaaactttctggtacagactgcagtttttaaaagatatttccagtgttatgtttgctgatcagaagactatcaacttttgatcaccattattatcacagaatagataatatatgaatgcctccttaatctcagactaaccacactctaccaccctactttctttttccatcagaaagcattctaattttaaaattattctaagtctaataaaattgagaaagtaaatgtactgaaagtgttataatgaattaataaaagccaaacttcatgctaattatttttttaatattcttgtattatctatcacagttctctatgatcatagcagttaacacttactgaggacttactttattgcaggcactgctaaatgctttgcctttgttcttttacttaattcttacaacaacatccttaagtaggtacgttcacgtcccattttatagatgaagaaatgaaggcctaaaaaggctaagtaacttcctttgagaagctaagtaactgcccatattcacacagctggaaatccaggatgttagatggaaaattctgttggcagtgctggtgaaaatgcaaattggtacagcccctctggaggggaattgggcagtatcacattcacctttaccccttctcagcaatgccatttctaggaatcttccccgaagatagtattggcaaaatatacagagaggtacttgtacatggctgttcattgcaagactgtaatagttaaaagactagaaataactcagatgtctgccattgaataagccatgatacatccacacactgaagtactatgtggttttttgttgttgttgttttgtttttttttaagagacacggtctcactctgttgcccaggctggagtacagtggtgcgatcctagctcactgcagccttgaagtcttgggctcaagtgatcctcctgcccaggcttctgaataactggcactacaggtgcacaccaccatgcctggctaattattttactttttgtagagatgaggtctttctttgttgcccaggctgatctcaaacttctggctgcaagagattctactgcctcagccttccaaagtgctgggatttacaggcatgagccgctgtgcctggcctatgttgttgtttttaaaaaggaatgaagagtgtgggtgttggccataataaaagaaaaaagccagtaaagaaacagagtatgtgccgggagcagtggctcacgcctataatcccagcactttgggaggccaaggtgggtggatcaccaggtcagtagttcaagaccagcctggccaagatggtgaaaccccatctctactaaaaatacaaaaattagccaggcacggtggcaggcacctgtaatcccagctacttgggaggctgaggcaggagaatcacttgaacccaaggggcagaggttgcaatgagttgagattatgccactgtactccagcctgggcgacagagtcagactccgactcaaaaaaaaaaaaagaaacagagtttttatgtaagaatggaatgggggaatggggatacaaatatagacatatcagcttatgtacttaaagataggtagataaactgtaaaagtaatcatatgtaggagatagtaagggacagggttagaagttaacaggtttctgaacatatcttgttttgtagatttgactttagaatccagagaatgttttacataattacaaaactaaatcaaaaactttttaaaccttaaaagtcaaaagcaaaatgaaacaaatggacctaacgtgtgtcaaattggtagcataactacacaggaattattttcaaaatgtcgttaaaacagtaatttgaggctaggcctgtaatcccagcactttgagaggctgaagcaggcagatcgcttgagcccaggagttcaagaccagcctgggcaatacggtgaaaccccatctctacaaaaaaaatacaaaaattcaccaggcatggtggtacgcacctgtggtcccagctacggggtggggagggggggtgttgaggtgggaggatcacctgagcccaggaggtcaaggctgcagcaagctgtgattgtgccactatactccagcctgggtgacagagcaagaccttgtctcaaaaataaaaagtttataaaaaagaaagctagggtttaatccacgtatatgtgactccagaatgttaactcttaaccattgtaccattgtttcccataatgtggttatatcaccatatgaggggatttctgtggcacctagaaaggactttttattgtaatagctaagtatttattttaatattaccttctatttgtggtaagaaaactactggaagttttccatttaaaagtatgctgatatttaaaagtatgctgatgataagcatacttttaacataaatggaattaaaaattggcttaaagaaaaatagatcagccaggtgtggttctggaggctgggaagtccaagagcaaggtgctggcatctggtgaggactgccctctgcttccaagatgaagccttggccgggtgaggtggcttacgcctgtaatcccagcactttgggaggccaaggtgggtggttcacctgaggttaggcgttcaagaccggcctggccaacatggtgaaaccccatctctactaaaaataacaaaaaattagccgagcatggtggcagacgcctgtaatcccagctactcgggaggctgaggcaggagaatcacttggacccgggaggcggaggttgcaatgagctgagattgtgccactacactccagcctgggcaacagggtgagactccgtctccaaaaaaaaaagagaaaagaagaatagttcagtattggtatagtagtggtagaattgagatgtgacaaaaattgtatggcatgacaaagttggaacctttctaggctgtactgactccattggtgtgaatgatgaaataagcatttaataagctttgcttatacccctaatatccacattttaattttatgccagactcttttgaaaagagaaatattttgcataaaaccttgtgtgtgtgtgtgtgtgtgtgttgtgtatgtgtgtgtatatctgtatgttttcaaaggccttaaccattataagaaattacaggctgggcgcggtggctcacacctgtaatcccagcactttgggaggctgaggcaggtggatcaccaggttaagagattgagacaatcctggccaacatggtgaaactccatctctacaaaaaatataaaaattagctgggcatggtggcgtgcacctgtagtcccagctacttgggaggctgaggcaggagaatcgcttgaacccggaggcagaggttgcagtgagccaaaatcacgccactgcactccaacctggtgacagagtgagactccgtctcaaaaaacaaaacaaaacaaaacaaaacaacaaaaaacttacagaggacattttttattgttgttacagaatgtcatacccaggctatcccccaacaggctacccacctttccctggatatcctgtaagtattgccacttaatacctcacatccttaaaacaggtgttgtttgggactggcccatgtcagatcttacagatatgcttgagcaggggtcataaattcagatgctcagaggtactacgtagaagtgaggaaaggcaattgtgtgggggactagagaggtcttgctttgtctattgaaagctggcaggtgcttagcaccagccctgtgtagccatggagggaggcacactcagcgttgctagatactccagcccttcaagtaaagccagaaacttgggttctatgtgaaattgcccaaaggttcaaaatttaggagttagttttaaaaaatgttaactgctgtatgagccagtaaaacatggatgtaagcaaaatccatcccatgaatcactggttctttttcttttttttaatgcccttgagtcataatatcactgcatcttaacctttgtgttagaatgtttaaaataattaacggcttggctagacccagagataaattgcagtggatttgtagttcttagacttggagtacgttttataaatgtgctactaagttccaccttgttgatagctatactactctgaggactaagagctgagccataagtaagaattgtgcgtttcagtttttgtttgtttgtttgtttgtgtttttgagatggagtctcgctgtgcgcccaggctggagtgcagtggtgtgatctcagctcactgcaacttatgcctcctgggttcaagtgattctcctgcctcagcctcccgagtagctaggatttcaggtgcccgccactgtgcctggctgattttttgtatttttagtagagacggaatttcaccatgttggccaggcttgtctcaaactcctgacctcaaatgatctgccctccttggcctcccaaagtgctgggattataggcatgagccattgcgcctggccacatttcagttttttgtttttgtttttgtttttgtttttgagatggagtctcgctctgtcaccaggctagagtgcagtggtgtgatctcgactcactgcaacctccgtctcctggggttcaagcgattctcctgcctcagcctcctgagtagctgggattacaggtacgtgccaccacgcccagctaggttttgtatttttagtagagatggggtttcacaatgttggccaggatggcctcaatctcctgacctcgtgatccgcccacctcggcctcccaaagcgctgggattacaggcatgagccacttagcccagcccacattttggttttatactcataactgtggggctgctatctaaccctgggagaataggaagaggggtctatacaagtttatgataatatgtatccttatgcaaagtgattatatagctctcgtgaatttatcataggagagatgagaattatggatatgttcccaagtccctatgtattaaacaggactgtagtaactatttcagtcagtgtaggctaattgctaaaacagacaactcccaaatctcagtgacttaacacgatgaaaaaacaaatgtatttctttcttcagtttcctggacgtcagtggaggatagggggtgggtgggacgaggctttgtttcatgcagtgttttgggtttccaggctccttccttattctgatcctaccatcctttagcactttggagtcctccactggatcctctgcttatgggtggcagatgaaggaagagagagagcatggaggatttgccagaggtttttaggggacaggtttagaaagtggtgtatctcacttttgtctatgttcatttactgatattcattcatgtggttcgacctaactgcaagggggtctgggaagtgtagtctgtatagctttgtggcctggggagaaagagttcagtgaacatgcaacaatctctgccactctgcatattgctgctctgaaccatgaagtccaaaatgtcacatccggtgtgtgatgtgatatacaggttaccttttttatttttaaatattatgtaacagatccagatgtgttgcaagaaagcctcaaattcctctgtttaggatatagaggaggatctttctcatatttgtagatgctgggaaaatgaaggaactgatgagttttttttttttcttaaaaccttgaggtttgtaaagaatcctgttctgactcccaaatagagaagcagacccctcttgcctgactcaagtagaattaaatttaactgaattctgacaaacaagtgtccttacaaactggtatactgataaactagtataagataccaggatttctaatgggacttttaaaaagtaaaagaatgaggtagaccttaataataacctctgtttgttccttatttttagatgggtcatatttctctatgatcgtatttgtttaaaaattattctgatttttcagcctgcaggtcaggagtcatcttttcccccttctggtcagtatccttatcctagtggctttcctccaatgggaggaggtgcctacccacaagtgccaagtagtggctacccaggagctggaggctaccctgcgcctggaggttatccagcccctggaggctatcctggtgccccacagccagggggagctccatcctatcccggaggtgagttacgggttgcggaattagtaatgattgggattgctgtagcactttttccttctccctttatcctcttcattcctgcttgttttgtataaggtcaagtcgctcttaggtaaccttaggtagtaaggacctagctggcaagatggagggatgaagattctctggggacatgaaagctgggagcagtttcaaaaattccactgtgaagggacttggaataaatttcatggcaataaaggaccaatatgtaacactttgcttgtttgtagtcttaagacctgattaagacatttcaattagcaagactgtgacctttaggtcagctttattcaaaggtaaaaaagaccccaaaaaacaacaaaaaaaccttagcccttttgtattttaagttagtagggaagagtaataaagtaatattttggctgggtgtggtgtctcacacctgtaatcccgacactttgggaggttgaggtgggtggatcacttgaagcaaggagttcgagaccagcttggccaacatggtgaaaccctgtctctactaaaaatatgaaaattagctgggtgtggtggtgcatgcctgtaatcccacctacctgggaggctgaggcaggaaaatcacttgaacgtggtaggtagagtttgcagtgagccaagattgtgccactaaactccagcctaggcaacagagtgagactgtctcaaaaaataaataaatatataaggtaaaaatttaaaaacttattttttactggagaatttgaagttttgaatctagataaacagggactgctattatagcattaatagcatatttttccactgttaacaatagatatttttctaaagttttttctgcaatcatgagaactgtactatagtttattgacatgttcttttctctagttcctccaggccaaggatttggagtcccaccaggtggagcaggcttttctgggtatccacagccaccttcacagtcttatggaggtggtccagcacaggttccactacctggtaggtaccagctgtccagaaaaaaacagtatcatgatattttgagtttttaaatcaccattgagggaacttagtttatatttgagataatctgcaataaatgtttatatttccataaataattttaaacataatggttttatgaaatatattaaattgatggaaaagtttaatcagtaaaatagagataaagtcacactttttctattaaaaaaatctgtcccaaagccaaaaggaagccttcaggaacttctctgcccactcctgtaccaatagtaaaaccacccccagaactgtattctgacaaccattccaggtggactcagaatttaatctgattcaagtgtgaaaaaagtattatttatgaggatcttatgtagaacatggaatattaaaaaggttcttatgaccaaagttggttttagattcagtaaattatatttttaaaaactatcctcataagtatcatagtgtgaatgttcttgtatgtttccatattcatagtcatcaatgctgttttgaaaaattaaaacatgtaagacctgttgccgtattattattattttttttaacattataggtggctttcctggaggacagatgccttctcagtatcctggaggacaacctacttaccctagtcaggtattttgttcctaccttttaagctcactctaggtagctagataaagaaggaacctatcctttgctgaggtttccatgggtcggaggaaatggcccattatagtaatggaagactaaagtctttacttctgatagactccatactttctttggtccatctgctttaatagtgtcctgatgactttgagaagacaagcataggtctattctcataggtaatgattctcacaactttatcctggagattaacctggggtcttggttttagttctttttcctcttccttgcccttaccagcagttacacctatgaatttgggtggctgggtgattggtatttctgacagtgatttatgtagggtggttttgtttcccatttttacctttataacttttcactcttttttcagatcaatacagattctttttcttcctatcctgttttctctcctgtttctttggattatagcagtgaagtgagtaaggttttctaatgtttactaatcactaggtcctttatatgtgcctttgtttctgattctcatgtacttgtctctcactacttcttaagggctcacctgtatctattttatctttgtgttcctgtaataataggtagggctttagacatagtagccagttagtctgttgactggattttctcattagctgcagagtttcctatatgtcaaatatttgccctactccgtatggcttctttttttttttttttgagatggagtttcactgttggcacccaggctagagtgcagtggcacgacctcggctcactgcaccctccaccttccgggttcaagcgattttcctgcctcagcctccggagtaactgggattacaggcgcacgccactacacctgtcacatttttttgtatttttagtagagacagggtttcaccatgttggccaggctggtctcgaactcttgacctcaggtgatccacctgcctcggcctcccaaagagctgggattacaggcatgagccaccacgcacggcctggcttcttattttaatcccaaattttattcttaaattaccttgttaatttttttatagcctatgcaagttactaggaacaaaataagcagtatacttgatgcttacttttattttgattttcttattgatttctatattggatattcatgaatgtctagcattttcaagcttgttttaggctggggtaggagaaggattctagtattggaagagaaacatcttagtgatttttttagctcactttcctgatttgaggtatgtgagctccagagaggttgagaaacttgtctagggcaacacaactagtgaaggacaaagctgagaagattctagtctatatcttctgccttctagaccagcggtctctctcttatacaaagttgctttgctgatacagtaaatgatactcctcccaagcatgtagtaagttgctttcagtcctttttttcattgttgaagttgtttgccaatcatattataaacctgtaatcacttttgttatgaaaattttgattttagtttaagcatgcatataattttagagaaatcattttacgactgaatatgaatgacttttaaacatgaaacactaaaagtaaatcacatgtacttatgcaacttatttttatttttattttttattacactttaagttctagggtacatgtgcacaacgtgcaagtttgttacatatgtatacatgtgccatgttggtgtgctgcacccgttaactcgtcatttatattaggtgtatctcctaatgctatccctccccaccaccccaaccccacgacagtccctggtgtgtgatgttccccatcctgtgtccaagtgttctcattgttcagttcccacctatgagtgagaccatgcggtgtctggttttctgtccttacgatagtttgctcagaatgatggtttccagcttcatccatgtccctacaaaggacatgaactcatcctttttatggctgcatagtattccatggtgtatatgtgccacattttcttaatccagtctatcattgatggacatttgggttggttccaagtctttgctattgtgaatagtgctgcaataaacatacgtgtgcatgtgtctttatagcagcatgatttataatcctttgggtatatacctagtaatgggatggctgggtcaaatggtgtttctagttctagatccttgaggaatcgccacactgtcttccacagtggttgaactagtttacagtcccaccaacagtgtaaaagtgttcctatttctccacatcctctccagcacgtgttgtttgctgactttttaatgatcgccattctaactggtgtgagatgatatctcattgtggttttgatttgcatttctctgatggccagtgatgatgagcattttttcatgtgtctgttggctgcataaatgtcttcttttgagaagtgtctgttcatatcctttgcccactttttgatggggttgtttgatttttttcttgtaaatttgtttaagttctttgtagattttggatattagccgtttgtcagatgggtagattgcaaaaatgttctcccattctgtaggttgcctgttcactctgatggtagtttcttttgccgtgcagaagctctttggtttaattagatcccatttcttaattttggcttttgttgccattgcttttggtgttttagacatgaagtccttgccgatgcttatgtcctgaatggtattgcctaggttttcttctagggtttttatggttttagatctaacatttaagtctttaatccatcttgaattaattgttgtataaggtgtaaggaagggatccagtttcagctttctacatatggctagccagttttcccagcaccatttattaaatagggaatcctttccccatttcttgtttttgtcaggtttgtcaaagatcagatggttgtagatgtgtggtattacttctgagggctctgttctgttccattggtctatatctctgttttggtaccagtaccatgctgttttggttactgtagccttgtagtatagtttaaagtcaggtagcgtgatgcctccagctttgttcttttggcttaggattgtcttggcaatgtgggctcttttttggttccatatgaactttaaagtagttttttccaattctgtgaagaaagtcattggtagcttgatggggatggcattgaatctgtaaattaccttgggcagtatggccattttcacgatattgattcttcctatccatgagcatggaatgttcttgttcttccatttgtttgtgtccttttttatttcgttgagcagtggtttgtaattctccttgaagaggtccttcacatcccttgtaagttggcttcctatgtattttattctctttgaagcgattgtgagtgggagttcactcatgatttggctctctgtttgtctgttattggtgtataggaatgcttgtgatttttgcacattgattttgtatcctgagactttgctgaagttgcttatcagcttaaggagattttgggctgagacaatggggttttctaaatatacaatcatgtcatctgcaaacaggaacaatttgacttcctcttttcctaattgaataccctttatttctttctcctgcctgattgccctggccagaacttccaacactatgttgaataggagtggtgagagagggcatccctgtcttgtgccagttttcaaagggaatgcttccagtttttgcccattcagtatgatattggctgtggatttgtcataaatagctcttattattttgagatacgtcccatcaatacctaatttattgagggttttcagcatgaagtgctgttaaattttgtcaaaggccttttctgcatctattgagatagtcatgtggtttttgtctttggttctgtttatatgctggattacatttactgatttgcatatgttgaaccagccttgcatcccagggatgaagccaacttgatcgtgatggataagctttttgatgtgctactggattcggtttgccagtattttattgaggatttttgcatcgatgttcatcagggatattggtctaaaattctcttttttttgttgtgtctctgccaggctttgttatcatgatgatgttggccttataaaatgagttactgaggattccgcctctttctattgattggaatagtttcagaaggaatggtactaactcctctttgtacctctggtagaattcggctgtgaatctgtctggtcctggactttttttggttggtaggctcttaattattgcctcaatttcagagcctgttattggtctattcagggattcaacttcttcctggtttagtcttgggagggtgtatgtgtccaggaatttatccatctcttctagattttctagtttatttgcatagaggtgttcatcctattctctgatggtagtttgtatctctgtgggatcggtggtgatatcccctttatcattttttattgcgtctatttaattcttctctttttccttttttattagtctcatatgcaacttattttatgcaacaattaccaccttaagctggaactaaaaccagtaggtagaagttaacagaatgcagagtgttagattttggaagagcttttagatggaagtgaaataggctaccctgtgaggggtgagcttcttgtcactgaaagtccacaggcagattttggttgatgttgagtatggatgtgtctgtgtgtatcaaggaaggtgtaaaaaaaatttttgtcttagatgggaagttgggccagtttatccctcctgattgatccagttctctaattctgttatagtcttgttgttgttgttgtttcatttgtttgttcaattttgagtcagggcctcactctgctgctcgggtcaggctggagtacagtggcgtgatcaaagctcactgcagcctcgaaatgctgggctcaagcgatcctcctgcatcagcctcctgagtaactgggactatagttgtgcaccagcatgcccacctaattttttaatttttggtaaagatgaaggttttgctgtgttgcccaggctggtcttgaactcctgggctcaagcgatcctcctgcctcagcctcccaaaatgctggagttgcagatgtgagccactgtgcccagctctatgatagtttttcagcaagaaggttggaatcaaatgggcattaaagaagaatagcaaaggttggaacttctggtagcagattttgctgagaactctcccctagaatttaacctcaagaacacagatcctgatttctctctttttttttttttttttaagagacagagtctcactctgttgccaggctagagtgtgcagtggcgcgatctggggtcactgcaacctccgcctcccgggttcaagtgattctcctgcctcagcctcctgagtagctgggactacaggtgcgcaccaccacgcccagcatttttgtatttgtagtagagacagggtttcaccatgttggccaggatggtctcaatctcttgacctcgtgatccacctgcctcgacctcccgaagtgctgggattacaggcatgagccactgtgcccagcccagatcctgatttctttgaattcagtttaatgcctggaagatgacagtattcttgaaaatttacttcaaacttagactttcggcagagaatacatcaaaaaaatttttccctacagatgaaatatgaaatcaatatatatatatgtgtgtgtgtgtatatatatatttttatatatatatatatatatatatatattttacaaaagagaatcacagaaaatgagaatcatcaaatggtacacagtgagggttagtttatctattccagtgtattagaaacaatggcttctgtcctatttaggattttagtgacagcggttacatcaaaggaaacttagtttcttgagacatgaaggcttataaaatttttttatactcgactatttgctacaagtagaataattttggctttctattaaaaccactataggtatatttgttagttctctgcttacagccctagcttggaaactagtagaggatggatgctaaggcttactggtagaagaaaatgttggagtaaaaatatatatgagtgggaggagctattgacccataaaagtgttatcttgaaaagctgctgaaagatggggcttgttctcatctcctcagttgctttgcccccacaaatgctggtgtactgctgtattcaatgtgtataactttaaatacagtttctgttgtctaaaaagcattgaatcatcttttattttgaaatggtattgattgcatgtttaaatgataatactttggaggtattggattaaataaactgtgtgtgtgtatatgtgtgttttctgcagtgaaaacacttattttacaacagtaatctttattttaggtcaacattcaaacatacaagaaatgtgttgttacaattaaaatttttttaaaaagtagtggagcatcatcttcatcccatccctcttaagccctgacttgaacaccctaagaaacttcttgaattattctgggctggccgcacacctgtaattccagcactttgggaggccaaggcagggggatcacttgaggccaagaattcgataccagcctgggcaacatagcaagacccccgtctctacaaaagtaagaaattagctgggcatggtggcacatggctgtagtgctagctactcaggaggctgaggcaggaggattgcttgggctcaggaattcaaggttactgtgagctatgtttgtgccactgcactccagcctgaacaacagagtgagagcctatctctaaaaaataaaaaattgggggaaactattgaattatttcatagctttgtattttaaattgttttatcttttaattttgacataattttagacttgcaaaatagtacaaataatttgtatataccctttactcagattctccaaatgttaacttcctacataaacacaatgcaatgatcaaaatcaggaaataacatcgatatagtactgttacccaacctacagaccttatttcagtttcaccagttgtctcaatgatgtcctttttctggttcaggatcaaatccagaatgcaatgttgtatttattgtcatgtctcttaagtctcctttaatctgaaatagttcctcagtctttgttgttcatgcccttgatgcttttgaagaacactgtcagttattttataaaatatttcttaatttgggtttgtctgatattttctcatggttaaatccaggtcatgcctttttggcaagagtaccacagaaatgattttgtgcccccagtgcatcatatcaggagacacttattattgacttattccattactggtgataattaattttgatcatttaagttggtgcctgcaaggtttctctgctataatgttataggttatacaaatatcctgtttctttatacttttgccacctaattttagcacccactgttgattcttgcctgaaacagttactaccatagtatttgctaaatggcaatttttaattttcatatagatttatttcatgtataataatcagggtccatataggaaattaagagagattactaaaattatattgctggtttgaaatctcactgggcattcatgtgctacttcactaaagccattttatattcttctgtttttaaatcaaacattgtcgctcatctcacaccattcagggatcagtcttcttttttcttcctattctaccaaaaaggaaactatagtaagattgtgactttaatttcacaagtttggccatcttgtctcctggaagtttggtgtctggctatctgttggcaggagaaaaatctgtcctgaagggggataggtctttcctgtctgttccataatgagctctggtaataaaatgctcatatccttgccttaaaacccaaacattggccttcttacttaagattgatgtctggggaagtctttaagtttcctcattagaaacttactggaaatgctgacacggattttatgccttttattttcagcctgccacagtgactcaggtcactcaaggaactatccgaccagctgccaacttcgatgctataagagatgcagaaattcttcgtaaggcaatgaagggttttggtaaggaaaacaaatttttgtcttttttaataagttaaagtaatcagttctaaagtaaaaataaaccttatctcataaacccaagtttatgtgtcagcctgggtgcgcatacctggatttaatctgatgtctagtgccttgtaagcattctaagagatgacctcaggctgggtgtggtggcttacacctgtagtcccagcactttaggaggccgaggtgggcagatcacctgagttcaagaccagcctggccaacatggcgaaactccatctgtactaaaaataaaaagtaaaatagttgggcatggtgatgcatgcctgtaatcccagcttcacgggaagctgaggcaggagaattgcttgaacctgggaggtggagattgcagtcagcctagatcacaccattgcacttgcacccccagtctgggtgacaaactccgtctcaaaaaaaaaaaaaaaaaaaaaagatgacctcaagcagcacctagcatgtactttgtccttacttaaacatgtgtggttcttccagggacagatgagcaggcaattgtggatgtggtggccaaccgttccaatgatcagaggcaaaaaattaaagcagcatttaagacctcctatggcaaggtatgtttttctttcctggaatgagcaccagcagtggctggtagactctgcattcatgtcagattggatactatattttgattagtacctgtggtgcaaaagagggacaactagactttagagacctcaagggtactgtattccctatttctgttttttgttttgttttgttttgagatgaagtctcgcaccaacatccaggctggagtgcaatggtgcgatctcagctcactgccgtctttgcttcccgagttcaagcaattctcctgcctcagcctcctgagtagctgggactacaggtgcacagcatcatgcctggctaatttttgtatttttagtagagacagagtttcaccatgttggccaggctggtctctaactcctgacctcaagtgatccgcctgcctcagcctcccaaagtgctgggattacaggcgtgagccaccatgcctggcctatttctcttaaaaggctttttcattctagagtagtccttgatctcataatcataccttaccccagtcacatatgtgatagacattcagtagaaagtagatcacaactacaatcatgatcaagaggatggttctcagtcttctgcctgttacagtgggattcaaggcttattacatagcccttgtttattcttggtcctgggcatcgccttctgcttctctccctttctctaaacgtgtcctatgttaaaattatatggactgagcgtggtggcttacgcctgtaatcccagcactttgggaggccaaagcaggagaatttcttgaggccaggagttcaggaccagcctgggcaacatagggagacttcatttccaacaacgatgacaacaaattatattagctgggcgtggtggcgtgtgtccatagtcccagctgcttgggaggctgaggtagaaagattgcttgagcccaggaagtcaggctgttagtgagctgtgattgtgttactgcactgtagcctaggtgacagaacaagacgctgtctcaaaaaaaaataatatggaaatgcttgccattctctgtacacgccatgatcttttatgcttctgtgttgtgtacatgccattctcctggccttgaataccttttctttttttcatggcaaacttctttaagatttggcttaaatatcagctactctgaagtttctttcattagtctggacagaatttagctgcttcttaatactgtagtcccatagcactttgtaaaacctctgttattactaatctcacggcccacccccaaaaactgagctcccataggacaaaccatggtcatagtcatctttgtattacagtaccaagtatataatggcaagtagccacttagtacttgttgaatggatgatcagtttctaaatccaacaagattctatggctaaaaaatgccattgttcctcagatgtaatgggaaaacatggatagcactgctttgctttttttttttttttttttacttttttttgagacagagtctcaaaaggctggagtgcagtggcatgatctccgctcactgcagcctccactttccaggcaagagcgattttcgtgcctcagcctctcgagtagctggaattataggtgtctgccaccacacccagctaatttttgtacttttagtagagacgggattttgccatgttagcaagtgtggtctcaaactcttggcctcatgtgatctgcctgccttggcctcccaaagtgctgggattacaggcatgagccaccacgcctgacctgctttgccatttagataggaatcctaaaaatatcctaatgttctctgcatctagtttatatttctcagaatggggtagtggtccattgattggtcccaccttgcttattctattttgcctttccctgtctgcccagcccagtgactgattatgcaacacaaaccctagatctccttaagcttcaacatcagactcactattctcacaaagatattttccatgttatgaattttttatctagtctgcacaatgctgtctcaagtttttttatatattgctttagaattaaaactaacaatctaatttccgtaccactagccacctcttttcttaacttcctaattagtaaaacactgtttttctagcctgctatagtcatctttgagtccatgtttttcttttatcatagggagtattctgtatgctttgtcctagcagttggttatttactagtttttattgatctaatctataaaatggccctttaaaatgtttcttttgtctactttgttccttctcatttccattgttaccattcaagtccaagactttattacctcttaactaaatattccagtagcctaaatgttttcatctatagcttctttgtcaccatcatccattctgaatattgttgctacatcagtgccattttcttgcatgaaaagtttccagtggttcctcccagcaaacagaatcaagtccatattctttagcttggcattcagtgtaataatccaagatttagttacaactttgttttaactcatctattatgaaaaccttcctctgtagcaaaaccggttgtcttattgttccattgaacaagctttgctcattcttggctctatacgagtaattctcaaccttaactgaacatcgtaatttcctttaaaacttaaaaatacacagaatctctgagtcttagtcctggacatcaatgtttttctttttttttttaaagctccacaatgaatgtaatgaagagtcaaggctgggaaccccttctctgttccttggtggtgttccttcttacctgaaatacctttctccttcgtctttgcatgctaatttttacatttttctctgagctctccagctgactttgaactttttctgtttcaactttctctattacttatttctatgctacttacccagtgctagagtacaggttaccttacattattttttttttagatgtgtatctttccaaataagaacaatatcggctgggcacagtggttcatgtgtgtaatgccagcacttcgggaggccaaggcgggtgtatcacttggggtcaggcattcaagaccagcctggccaacatgtgaaaccccatctctactaaaaatacaaaaattagcctggcgtggtgggatgtgcctgtagtcccagctactcagggggctgaggaaggagaagcgcttgaacccaggaggcagaggttgcagttagccgagatcacaccactgcattccagcctgggccacagagcgagactctgtctcaaaaaaaataacaacaaaaaacaaataagaacaagatgataatggtttctacttcctcatagaaccaagaacagttccttttactaagtaaatatctgtttatcattttgtcagtttgaataattctttgtttcatatatcccttgtttttgtacctggtagagtggaataagattttattaaatgtttattgatagaatgaataaaatagatctgcttgagtgtaataaatgtgtaagtgtaacagactttaaatttatttacttcttttttatttctatttatttatttttttttttgagacggagtcttgctctgtcgcccaggctggagtgcagtggtgcgatctcagctcactgcaagctctgcctcccaggttcacgctgttctcttgtgtcagcctcccgaggacctgggactacaggtgcctgccaccactcccggttaattttttgtgtttttagtagagacagggtttcaccgtgttaaccaggatggtcttgatctcctgacctcatgatcctcctgccttgacctcccaaagtgctgggattacaggcatgagccaccgcgcctggcctttatttacttcttagtatattaacattcagctttcaaatttaggtttttataaagcaattccatttctttttttgtattttccttaaaagatttaagtgacaaaatttggagaacacatatacttagcttgtatttgtgattaaataggatttaatcaaagatctcaaatcagagttaagtggaaatatggaagaactgatcctggccctcttcatgcctcctacgtattacgatgcctggagcttacggaaagcaatgcaggtactactatatgtcatttattatgaatattttgtcctatttcatatgtaaaaccgtacaaattatgacagttctgaatttacagtggtaattaaagcaattctttatttcacatcatccatctgaatatatagtttttagttctacagaacaaagaaatatttgacgaagatttaattacttgcagaaatttcatttttctttgtataatcttcccttcatttcatgtagggagcaggaactcaggaacgtgtattgattgagattttgtgcacaagaacaaatcaggaaatccgagaaattgtcagatgttatcagtcagaatttggacgagaccttgaaaaggacattaggtcagatacatcaggacattttgaacgtttacttgtgtccatgtgccaggtgagtatagtatgaatgcttgtgcgttgatagagggaacatactttaaaagccttttgccagtgagcattctttattccttttaatatttagccaccttgcaatattgccatctttaagagggacaacacagaaaccagtgtacagatttctttgtagttactattgagatttattcctgtaaatctggcttttgtaaggaattagagatttaacctctaaggttgtatggaatcagaaaccaattcgaggctctgtggctgggatggggatgaaactgtacatttgagcttatcactatcctgcccattatgccccaccatcaagtgaagatgtgcaggactgccatagaggtgctacaggaagtgaggactatgtgaggagacccagaaatgcagaaaaatgttttagggttcccagtaataactgtgattagcaccttctttattttgattccccaggtgtgctggagaattgacagaaaatactccaaatagggtatttggaatggcattagaaacacacttagggccagacattgtgcctcacacctgtaattccagcacttttggaggccaaggcaggaggattgcttgaggccaggagtttgaagccagcttgggtaccatagcaagaaaccatctctataaaaaatatttttaaaaattagccgaacatggtggtatgtgcctgtagtgccagctattcaggaagttcagtgggaggatcacttgagcccaggagattgaggctgcagtgaactgtgatcgcaccactgcattccagcctgggcaatagagtgagatcctgtccttaaaaaaaagaaaagaaaaaaagaaaagaagcacacttagatgatgaaggtgtatttgaaagagattatgtaaatgactagcatgctgattcaatatcaagagttattgcctattgtgctagtgcacaagattggaccatctggagggatctaaaggagaggaggggctcttaagagccaagggaggggctgggtgtggtggttcatgtctgtaatcccagtactttgggaggctgaggcgggtggatcacctgaggtcaggagtttgagaccagcctgaccaacatggtgaaactccatctctactaaatacaaaaaattagccaggagtggtggcacctgtaatcccagctacctgggaggctgaggcagcagaatcgcttgaacccgggaggcagaggttgcagtgagctgagattgtgccattgcactccagcctgggtaacaagagcaaaactccatctaaaaaaaaaaaaagggaggtagctgtggaaaggatagtggatatggaaatgagaaagcaaagtaaatgggttgaaggaaattgaatttacctaaatcagagtaacaggagggcagtaggttaggatttaaaagaaacaagaaggaaaacagacaatgctaaaaaatggctattaagattttacatgaggtgctgagtctctctttatgcagagttcaaggcccagccctaccttttccagggcatgagtagaggagtaacttcctgagaaagtgtgtgtgaatccaaaggcaataatctgggaaattttttgtgagtaccttttcctgtgttatattcagtcgcccatgtagaatgtgcctctacgtattccttgtgccagttgctcagaagacagttcttcagcttcaaggaggatttttccatcttattccaaagatggtccctgagactctaaaaggcagccttttcttgtttgggtttgtctttctgtttttgagagaaaccaactgctcattaagcttaaactcttccttcctccttcctttcttcctattccagggaagagtgtggtatacaaataggcacagtctaacagaacatgagttatttgtagctgcttctgtaaagcttatgtgtcatttttatgcgtgtatttatggtaaatacttacatattaagattataattcgatggctgagtgtggtggtgtgagcttatagtcccagctactctggaggctgaggtaggaggatcacttgaacccaggagtttgaggctatgatcatgtctgcaaatagccattgcaccccagcctgggcaacatagtgaaatcgtgtctcttaaaaaaaaatattatactcagatgaagaaaagaaagtttatgaagcctccatattatatcctccctccctcctgccctagagttaaatttcttgagggcagagaccctgtctctcctgtgtccctaccgcttaacacagtgcctgacacaaagaaagtgcttaatgtctcttagtcgcatgaatgaataaaaagtagaactcagtacagtgcatattgatcttaaattccagctaagagagctgtttcttcatttgagtggtagttaatatctcctagtagagatatttttgtttaaacattttgggtttaatttagctcccaaaagccctcatttttaacataacctcattaaaccgtgatcttatattataaaatccagttgacagtataataaattactagttatatttccatgcatagaaatgaagcatatgcatgacagacattatggattaatctttaataaattatctctttaggccaggcccagtggcttacatctataatcccagcactttaggaggctaaggcaggaggatcacttaagcccaggagttagagaccagcacctgggcaacatagtgagacatgctgtctctacaaaaaataaaaaaattaaccaggcatggtcgtttgtgcctgtagtcccagctatctgggaggctgaggtggaaggatcacttgagcctaggaggttgatactgcactccagcctgagtgacagagcaagaccctatctcaaaaaaaaaagaaatagtctctttaaatccaaaagtgaactagattggaaaaaaaaaatttagtagaactattatttatttcttccaattcctgcctttctcttttgcagggaaatcgtgatgagaaccagagtataaaccaccaaatggctcaggaagatgctcagcgtctctatcaagctggtgaggggagactagggaccgatgaatcttgctttaacatgatccttgccacaagaagctttcctcagctgagagctaccatggaggcttattctagggtatgagcttttcttttgaagatttggcttctgctgtaagatacaaaaatatttaaccctttaattttgtttgcagatggctaatcgagacttgttaagcagtgtgagccgtgagttttccggatatgtagaaagtggtttgaagaccatctgtaagatatttttgtgctttgctttattttctttttaaatgagtgggagctttgaatagttgttcccattaaatgttgataatatagtccacgtggaatctgcttaggcagtagctgatctaatcctttggggtttgttttttgttgtttgttttctttattggataagcccccagaaacagtcctgtgtttttacatacaatttcctatgaatggtagttctgtgatcaaacagggctgtttggggattatttggccttcatctgtaggcctgtcttgataactgtgccagaatacctgatagttgtagcacttcctttaaagagaaagggaaagtcctgaggaactcacagtgtcaccacgaagcagtttgagtcctcaaaacagatatttcaggtactcagcccagtgagactcatttcctttttgaagttaaccagtttctggtggtctaatacacagatgtctaacaaagtgaaagtttcattctcatggatattaggactaaggggagtattagtaacactttggtattaacaatggaatgttgggccaggggcagtagctcacacttgtagtcccagctactcagaaggctgaggtgggaggatcacctgagtctgggaggctacagtcagccatgattgcaccactgcactctaggctggatgacagagtgagaacctgtctcaaaaaaaatcaaggagagcatctgaacactcttaactcaccccatgtttctgtgatgattacagagaaaataatcaaaggcaggctataagtgataaatgaagctggaggggtacacttcttgtgagatcatgattccatgtctcaaccatctctaacttgcagtgcagtgtgccctgaaccgccctgccttctttgctgagaggctctactatgctatgaaaggtgctggcacagatgactccaccctggtccggattgtggtcactcgaagtgaggtgaggcaggcctctctctttttgtcgggtcttacttgatgttcaatgttgatttcttaaaagttccccagttggttgtcagtccctcaaaaatgataagaaagagctctctttgccacctaaaagaggtggtataaagaacagaaaattcactttcctcatgctgtgggagaagcttgcattagtgaaataggccactctaccctaatgaagataatactaacagattttacaacttgagaacgtcaatggagaatacaaatttatgggaagttagacatttgtctttcgattttcattttgcttatataaaaattagatgaaaggcctatgtagattaatcctagtggatatcaacattatttaaatttagcatcctttattaataataaaacaatttttaaaatattcataattgtctcaagtatagcctcatttttaaaaattgtactttatatatttactccacttacaaaaaattttttttctcagaagaaatgacatttgaattttttttttttttttttttttttgagacatggtctcactctgtcacccagactggagtgcagtggcacgatctcagctcactgcaacctccacttcctgggttcaagcaattctgtcacctcagcctctcgagtagctgggactacaggtgtgcgccaccatgcccagctaagtttttgtatttttttggtagagatggggtttcaccatgttggccaggctggtctcgaactcctgacctcaagtgatccacctgcctcggcctcccaaagtgctgggatcacaggcgtgagccaccacgcctggcctgaacttttaattgaaagaaaacatggcggggtgtcgtggcttactcctgtaatctcagcagtttgggaggccaaggcgggaggattgcttgagcccaggagtttgagaccagcctgggcaacatggtgaaacctatttctacaaaaaacacacgcgcgcgcacacacacacacacacacacacacacgccggggcgtggtagcctgggcaacatggtgaaacctatttatacaaaaaatacacacacacacacacacacacacacggtgaaacctatttatacaaaaaatacacacacacacacacacacacacacacccacacccaccccccggcatggtagtcccagctacccagaatgttgaggtggaaggatcacctgagcctggaaggtcaaggctgcagtgagccgtgatcgcaccactacactccagccttggtgacagagaccctgtgtcaaaaaaataccctaaattattattattattgcgtgtttttttttttttttttttttttttttttgagatggagtctcgctctgtcacccaggctgaaatacagtggcataatctcggcttactgcaacctctgcctcccgggttcaagtgattctcctgcctcagcctcctgagtagctgggattacaggtgcgtgccaccatgcctggctaatttttttgtgtttttagtagagactgggtttcaccatgttggtcaggctggtctcgaactcctgacctgatgatccgtctgcctcggcctcccaaagtgctgggattataggcatgagccaccacacccggccaaaaaccctaaattatactaaagaaggtagattatttttaaagaaaacaaccagaatatggtattttgaaaaaaactttgttctttaacttaaattttcaaagcaggatgttttaagttgtgataaaatatacataacataaaaatttaccatttttaagtagcagtaagtacattcacattgttatgcaaccatcattaccattcaccttcagatgttttttcaacttgcaaaactgaaaatccatactccttaaacagtaactccccattctcctttctcccaactgctggcaacaaaccatgtgactttctgtgcctgtgtttgactactctaggtacgtcatattggtggaatcatacaatatttgtctttttgtgagtgttgtcttttacttagcatagcgtcctcaaggtttattcatgttatagcatgtcagaatttccttccttttgagactgagtaattaaatagtctattgtacgtgtatcccaccttttggttttttttttaattcatctgtgacacttggtttgtttctgcctgaataatgctgctatgaacatggatgtacaaatatctgttcaagtctactttcacttattttgaatatacccagaagtggaatttctaggtcatattgtaattctttggaagtgtttttgttttgctttgaggaattaaccatattagtttccacagcagctgcacccttttacttttccatcaacctgtgtacaagtgttcccatttcatggcatccttgccaatacttactatttttttggttttgataatagccatcctatcaaatgtttttaaatgactaatatctttggaataatagatgaaactagtactaccctgaccaagtattttacagagctgtgaatcagaccttcattgggtagtgctagcattggtatgagtgccagccataaaatgtcagtcacttggtgttttcccccccaagttttgattattattaagatcttattatttaaaaagaattttaagaaatgtcagttgtcacagatgtttttctgacagaaatattatttcttatgcagattgaccttgtacaaataaaacagatgttcgctcagatgtatcagaagactctgggcacaatgattgcaggtgacacgagtggagattaccgaagacttcttctggctattgtgggccagtaggagggatttttttttttttaatgaaaaaaaatttctattcatagcttatccttcagagcaatgacctgcatgcagcaatatcaaacatcagctaaccgaaagagctttctgtcaaggaccgtatcagggtaatgtgcttggtttgcacatgttgttattgccttaattctaattttattttgttctctacatacaatcaatgtaaagccatatcacaatgatacagtaatattgcaatgtttgtaaaccttcattcttactagtttcattctaatcaagatgtcaaattgaataaaaatcacagcaatctctgattctgtgtaataatattgaataattttttagaaggttactgaaagctctgccttccggaatccctctaagtctgcttgatagagtggatagtgtgttaaaactgtgtactttaaaaaaaaattcaacctttacatctagaataatttgcatctcattttgcctaaattggttctgtattcataaacactttccacatagaaaatagattagtattacctgtggcaccttttaagaaagggtcaaatgtttatatgcttaagatacatagcctacttttttttcgcagttgttttctttttttaaattgagttatgacaaataaaaaattgcatatatttaaggtgtacaatatggtgttttgatatcagcattccttgtgtaatgattccacaattaaggtcaggctaattacgtatctgtcaccttgacatagttaccattttttcatgtgtggtgaaaacacttaagatctactaccttagcaaattttaagtgttcagtacattattaactatagatactgtgctctacattaaacctctagcatttattcgttttataactgaaagtttataccctttgaccaacatctccccattttccccacctctcacctggacaaccaccactgtgtttaagttcagctattttagattccacgtataaatggtatacaata

SEQ ID NO: 49 - DNA, 523804 bp, Homo sapiens
  source 1..523804: mol_type = genomic DNA
actcctcagctgcaggagccagacatgtggagtcccagcagaggccaacctgtgtctcttcatctccgtgagaaaggtgcccccgaagtgaaagagatggcctggtggaaagcctgggtaagtgggagctggcaggagatttgggttcctgcatggtgttgggtgctggtcaccagggagtcctgagaaatgtaaagtcgcccttggctgggagtggctcagtctacatttggctgcctcctgggccaagcatggagggtgggaaggggccgagaagaaacagccccaggcctagagtgcccacggcagggatgggacctgggccgggagacaggctgatgaagaaatctagaaatgcaagggggaagctgaggtttgagaaaagtccaggggagggacccttgcaggggtggggccactcaaaggagggggtatcatggttgagccttgtgtgtaaatgtgtatggggtgcacacacgtgtgcatttggggagaatcaggcatactgctcctggcagagggaactgtgtgcagagggtcagagggcggggagcttggctttgagggaagctgctcagcacagctcaagggtcctggtaccggaggagatggacctggggaagcaggcagggccaggtcctgaaaggccttgcctggcaggctgaggagttaggctttaccttaagagaagtgggaaggcactgaagggctttgagcatgagagtaacctgaacctgctgttggggacccatcaatgccttcacctcagggatcaatgatgttcatttgtcaagactggagagggaagaggggaagcaggaggacctggcctgctagagcctggaggaacccggggctcagggcagcccatgcccagcagaactgatgggttctcgggagctttctgtctatggttgagcctgaggccatcgctgtgctaaggagttgaatatccagaaggggacagaggtgacatctcccggctgccggctctgcacacccttttcctttcctcccaggcagcctcaggatgtcagggctgcactttctgttttgcagatgatgaaatgaaggctcagagacactgagtgacttgctagggtccaatggccagcaggctccagtcagagagcagttgggtctctctgcccagccccaggttctctgtgagcttttgtgggatacccaggcttgtccagcttcagggagtctctggatcatagatgtcgcaacccaagcaagtgtcctcagggtcagacatgctaggttctggacaggtgggacaaagaggaagccaggctgaggtggggcagctgtcctggcccccagggaagcagacttcttccaggacaaggggccatggaggcctgcagcttcaaccagactgctgggaacctgcctttgaggaggtggacatggcagggagagcccagtgctgggtggtttccaaagtcagttgctggccaaggtagtctggcactgggccttgcacccagtgcagcaggacaaagggctgtccatgtagggacctgccaaattgacaggatcactgtgacactcactgagtccctactctgtggccggacccttctctaagcacctcacattcaatatctcccttgaacctcacaaggagtctatgaagtagacaccagtatccttatccacagatgaggaaactgaggcacaagtaggctaggcaggtgcccgaactcactagtaagtgtgagagtctaggtgagaatctgaacagcctgactccagggccaaaaccataccctggtcgtccataccccatgtgagagctggctcggggtagcaagttcacaggtagaccccacctgcaacagctgagctgctagcgaagacccagtgtcctctaggcacaaagctgggccaggaacgggatgggaggagatgagggagccactggagagagatctgtctgcaggcagggcccatctgcacctctctttttggtgttgccttttcctctgtgtctctcatagagacaaacccatctcccaggcctctgggcagccacatagcaggggaaggccaaggcgtggcagctcccctgtgcctgtcacagaacaagttatattaatagatgtagtcacaggctggtctgagtcaccttttcagtgaaaatgtgcctgtctggactagcacggccctgggcaagaccctgcaggagcctgaggctgacccttccttctcagcaggaggtctggagctccaggactccacactgatagccagggctccgattcccagaacacttattttctaaaaccttagagtgggaagtgagacagaggcttctcaatgcagcaaaatcagaaccagcccgggagctgcttacaaatgctgcacctgagacctaccgcacccctgcgggactgcatgctcctcagggatgcggttacacagcctgggcactcgctggtgcaccacagcccccgagtgctggggcagagggaagccggcaggcactgagagctgagatgcctcccacattcccagacgacctgcgttcctgtgggtgaagcttccttcagtggaacgttccaggaacactcattgcctgggaaaggtggagtcatcagtagggcaggggaggtagatagagctcagcttctgagtcaggctggggagtcccaacagcatcgcttactagctgtgtaagggagtccagatccctttctgtaaagtgaggcatcagtacttacctagcacaactgttgaggaagccatgacataagcattgcttctaaagcacctggcccaggtctggcacacacaaggggcttgaagtgctaacaggagtaatagcagagcgtgactccacaagcaagggatatcgtgtgtgtggacaccgatgagcacaactttatttgtttttaaacattcagggcctagtagatagcaggctttcaacaaatatttttgaataacaacaaacaagagtatggactttgggaacaggagagcctagtagccagcgagcctgagccaatccttgatggcctccaattctgagaagactctctgggcccccttaggctccctgtggaagaaagcttccccagtcaatcctaataaaaatacttctgagacagatctaacaggacaaagtggagtctctccactctttcagtagctccttcaccccaggtgctgtttggggttctgacactgccatggcatggccagcaggatggcccctagggctcctggggctgctctataagagcttcccacccctgacctgcagtccatgagggcaaggccagatccgggcacatgcccatctgtgttgttctcatgctctcagggggtagagctagtgtgttggacttggcatgtttagggtcacctccctgagggttgacaacctgagcaaaatcagcattcccttggcaaggaataaagggggaatggatttgtggtcagcaacccacatcgttggtcagcaacccaccgccaagcattctgcctgcaacagggtggggctggccaggggaggctcctcagggaaggtgaaagctgtgcagagttttgcaggatgactcagtgcttatcaggtagacagataaggaagaacattccagggagagggaggaatgctaacaacagcaggggatctggtctgtactagacatgccaaaggaatggtgtgtccatatcaacagaggagggagagacagaagagaaagagcttgtcagggcctgagtcagagcgggctcatgctgtggggctaagaagctcaaacgatttccagagacagtggggaagctttacagggacaggcaggggaggatcttaacccggctttcgtaagcctctggcttgagtatggaaggtgagtctgggacagggagcccagcgccgaagtgttgcaacagtatagggagacatacagaccaattccctcccacctaacagctctgtgctttggggtcctgggttagtttcctgggagaaggctggccttggctacctctgtccttgaccaaggacatcgttttaaatatttgtgatgtgtcctaggccactgcatctctgtccctgtagcgaagagaagatactgattcctaagctcctactctgagaacacaaatatctgcaatacctcggtaagccctaggcctgagtgtgaggttgcaggcacttccatggccccatgcaggtgtccaagttccctcgtggtatttggccaaggggggccctgtgtgatgccctagcgcggtgactacccgtgttcctggcccatgggcatcttccacggaattctgggcttagcctggggattcatgcgggcgcatctctgtgatctgctctggagcaggatgtacatcaggtctctcagacctgagtccctggtgcctggcgctcagccttgactgaagtgctcggcccaccctgctgggccagccagctcctgctcagggccacagccctgtaaccacggcttcctccccaggactcaggaattctcccactccggaatgccttgctgctggggtgaccaggtcttcacttgtgaaacaggagtcggccacctcagccctgcgcctggcctggtggaacatgggtcaccgccccaacctggggcagccgccccatcccaacgcagttgctgccgctctccatgcctccctgtgcccagctaaccgggggacttgtcccctgggaaaacctgggtacccaggctgcctttggtttcagcccctactcctcttcccgggctgcctgtgctccccggacggcccctttccccgggctgtgttcacatcagctgggaagggtcccttgcagacagatcttggacgaggtcgcgtcccccctcgtgaccagcaaactcctaaaagcggcccttgccccagagcccctgtagcctccaaccggcagtcaggaggcagcgccgtctcagcgccgcttagtggcgccaggcgtgcctggaaatccgctttcgcagcgccccctcgtagccgcctccgcccgcagaaaggcgttccctggacagagaagcgggcgcgcgggggcgggcgcgcggggccttgccggagaacctgactctccgcagcagcagtggaagccggagtgacgcgttgtgttgaacaccagttttctggagcgctgtgtgttctcaacagctgagcagtctgtttctccaatcaggtttcaaagccacttcaactgcactggcccctgtgggtcactgctgcaccgccctggcccatgtgggtccctgaggagcgacctgccggggccacctggctggacgaaaaagacacaccttggacttaagccgtgagaaaaaaacttcatcagtaagaaacaagtcaatagacaagtaaaagactaggagaaaatatgcataaaacataaaaaagtgacttgattcctgattctggagtatttaagaattcctataactcaacaaaaagttcagttttttaaaatgagcaaaaggcttgggtaaactattcacaaaggaacgtagacaaatgccagtacacacatgagaagcgcatacacatccacaaacttcaaacaagcccacctcatgtatttctagtgagtaaggaaaagaacgcaaacacttttgaaaattgtttggttgtttcttgtaaatttaaacaaataccctattatattatccagcgagtccatccttaggtttttatccaaggataaagaggtgaaaactcatatctaacaaatagacttctgaaaagatgaaaatagaagctttattcataaaagacaaaaactggaaataacccaaatattcattcacaggagaatgaataaacagactaggttgaatccatacaatggaatggtagcagacaataaaaagaaaatgaactattgatgccccctactgcacagcagaagctctgaatcgtgttcctgaatgaaagaagtcaggtatgaaagaataaacattgtatgattccatttatatgaaaatgaatctgtgatttaaaaatcagactagtattaggttggtgcgaaagtaattgcgttttttgcctttttttttttttaatagttgctttggggtttatggatggagtggcatggtagaggttagctgaagggggcatgaaataactttttgggggtgctagagtgttgtaaatcttacagtgggggagggacaggagtgcaggcatttgacaaaacacattgaattgtgaaatttaagatttttgaatttctttgtatgtaaattacctgccaataaaaacatgacgaatagagcagttatgagtatttgtgtgtagctttttgtgcaaacttaaattataatttctctgataaaagcccaggaatgtgattgttgagtaatatggtaagtgcatgttttttgagaaactgtcaatctatttttgggagtggctgtgtgtatcatgttatattctcacaagcaagggatgagaaatttggtttctctgcatccttgctagcatttggttttatcattatatttttatttcaactgctcaaataagtgtgcagtgatttctcatgatctcaatttgcatttccccaaaggctaatgatgttaagtatatttccacatgctgatttgactcggccatgaaatgtctcttcatgtctattgcccaatttcttatcagattttttttttttactgttgagttttgagagctctttatgcattgtaaatgtgagtcctttgtcagatacgcagtttgcaaatattttctcccctccatagcttgtcctttcatcatcttaacagaatattttgcagaggcaaagtttttaattttgatgaagtccaatttatcaattctttctttaatgaatcgtacttgggtgccatgcctatgaactcatcctcaactcctaggtccagatgattttctcctgtgtcttcctatcatagccagaaactagaaaagaaccaaaatgtccctcactaagtgaatgcttaaactaagtgacacatctatgccaatattcagcaataaaaagaaacaaattattcatgcaaataactaaatggatggatctcaagagcattaggctaagtgaaaaaaaccaatctcaaaaagtcacatactgtacgatttcacttgtataacattcttccaggggcaaaattataaacagtgaaaacagattagtggttggcaggcgttagaggcggtggtggggaagtgtgactacaaagaggtagcaggagagatcttgggatgatgggatagttttgtgtcttggtggttacaggaatctacacatgtgatacaatgtaatagaagaacacacattgtgctaatgtcagtttctttgttttgatattgttttgtagaatgtaaaacgtaaacagtggagaaactgggtgaaggatattgggaccccttcacaaattcttgtcaatctatgattatttgaaaatttaaaagtctaaacatgcataaaataaaaacctaaaaggcaaaaaagtaatgcacgcacttgataaaaatcaagtagtacaaaagagtaaatggtgaaaataaatctctgcaccactctagagaccccagccaaagtcctctccaaactctctcacagttattaagtttcttgtatatgcttctagaaattcatcttgcatatgcttctagaaaatcaagtagtacaaaagagtaagtggtgaaaataaatctctgcaccactccagaacccccagccaaagtcctctccaaactctctcacgattgttaagtttcctgtatatgcttctagaaattctctaggaatacgcaaaaatatatgtactttccctacttctctagcttttgtctaatgctagtcttctttctatttttaattatatgtatttaatatatctttaggaaaaattaatactttttaacagcagtgtaagatttcattgtgaatgtaccataatttatttaaccaatctctactcatttaatctgtttttggttgtttaggctggtttcggtagcttgttattggaagttattgcaataaacattcttatattactttgtatcatcataggatagactcctaaaatattgtgtttagatcaaagggcatgtggaattgtacttaagatagattttgtcaagaagtccccattctcatcagtacagaaggaaaataccaatttcctaaacctcttactaagacagtacatcttcaaaatttgatcctcactcatctggtggacaaagtatagtaattcagtgttttagtttgacttcccatgatgacaagtgaagctttaaacatgatgctttttatatatttaaaggccttttgtgtcattttcctgtgaactgttggctcaggtccgtccttcagtggagtttagtgaatctgcctcatttccctaatcaattctgtctcttaccactggaaaggaataccacagttgtttacccattcgttgacggacatttggattgtttctacttttcgggtgttatgaataatgctgctttgaaaacacttgtgcaagatattgtgtggatataggttttcagttctcttgggtatgtatctaggagtggaattccttggtcatatgataatactacacccaactttttgaggaactaccaaactgttttccaaagtgacagcaccatcttatgttcacaccagcaatgaatggggttttcaatttctctgcatcttcaccaacacttcttattgcctgtctttttctatgaaagccatcctaatgggtgtgtagttgtatcttattgcggttctatttgcgctttcctaatgactaataatgtcaagcatcttttcaggtgctttttgatcatgagtatatcttctttggacaaatatttattcaaatcatttgcccatgttttaattaggttattgtcttttattgctgaattgttagagttcttcatatattctggatacaagtggcttatcaaattttatatatatatatatatatatatatatatatatgatttgcaaatacttcttcccattctgtgggttgctttttgactttcttgatggtgtcctttgaagcacaaaagctgtcaattttgataatgccccgcttatttttttttgtttggtcacttctgcttttggtattatatctaataatccttttaccaatccaaggtcatgaacatttgcctctatggttttatagttttagctcttacatttagaactttggtccattttgagttaagttttgtacatgatgtaaggtaagtgtccagcttcattccttcacatgtggaaatccggttgtcccagcatcatttgttaaggcttttttttaatcctcttgaattgtcttgacacctttgtcaaaaatcagttaaccataaatgtgaaggtttaatattggattttcaattctattacatttctagtattgggctatcttgattcctagacgttggtagtaagtttggttttctttggggtttgggggggttgttttgtttcattttgtttttgagatagggtcttgttctgttgcccaggctggagtgcagtgccttgatcataggtcactgcatcatagacctcttgggctcaagtgatcctcccacctcggcctcccaagttgctgggactacaggcacacaccaccacacccagctaatctttttttattttttgtagagatggggtctcattatgttgcccaggttaatctcaaactctgggctcaagcaatcctcccaacttagcctcccaaagtgctggcattacaggtgtgagccactgcacccaacctgtattaagtttttaaatcaggaagtgtagtcctctctctttcaagatcatgttggctattctgggtctcttgcatctgcatgtgaacttctgagaaaaaggcacacaatctttcaatcaagattgcattgaatctgtagaccaatttgggaaacattgacatcttaacaatattaagtcttccaaatccatgaacataggatgttttttcatttatttaggtcttctttaatttccttcagtggtgttttattgttttcagtacgtacaagtcttagacttatttgttgaatttattcataagccttttattttgtctgatgccattgtaaatggaattctgttcttaatcttatattcagattattcattgctagtgtgtagaaatacaattgtttttcatattgttcttgtatctgcaatcttgctgaactcatttattagtcgtaatagttattttgtgaattccttagattatgtcatctgtaaatatagtttacatctttcttttcaatttggatgctattttttaaatttacatacttatttgcataattgccctagctcagatctctaatacaatgttgaatagaagtggtgagcatggacttcctttccttcttactggtcttagaaggaaagtatccactctttcaccctttgggatgatgtcagttgtggtttttcatagatgttctttattagatttcataaattctcctctatttctagttttatgagtgttttatcatgaaaggatattgattttgtcaaatgttttttctgcatctattgagattaggtggattttgtccttcattttattaatgtggtgtattaattagatttattttattatgttaaaccaactttgcattcctgaaataaatgtcacttgattgtgatacataatcatttttatatgtttctgggtttagtgtgctagtattttgttgataatttttgtattaatattcatgaaagatattgctgtgttctcttagaatgtcttttgttttggtatcatgagaataatgacatcatagaatgagttgaagtttgtttcttctatttttggaaaagattgtgaagaattgacaataatcttttttaaatgtttgggaaaactaatcagcgaaaccatttggtactgagcttttttgtgcatggtgagtttcttaattactaatttaatccctttacttactaaggtctattgaaattttctatttgttcttgattcagtttttgtagttcctgtctttctaggaatttttccatttcacctaagttaaaattttgctgtcttacaattgtttatagtattcctttataatccttttatttctatgaggtggtagtggtgtgccctatttcattctctaaacattattaatttaataatttaattccctatacattaataatttaataatttaatgtatagggaatgaaatagggcacataacttttttcttctcagtcaagctaaaggtttactaattttattgctcttttcagtgaagcaattactcttgttttttcccttagtgttttttctattccgttttatttatttccactacaatctttattattttcttctttctgcttgctttgggcttagtttgcgcttccttttctactttcttaaggtggaagtctgggttatcgagatctttcttctttttaatataggcatttacagctataaaagtctccctaagtattgctttgactgcatcccatacactttgatatgttgtgattttattttcattcatttcaaataattttctaattttcattgtgatttcttctttgacccattgattattttggagtgtgtcatttaatttctacatatttgtggatgtccgaaatttctttctgtttttggttttgaatttcactctgctattgttagagaacatattctatatgatttcaattattttaaatttactgcattttgttttatggatgaatatacatgtatgtgttttctattgctgccataacaaattaccacaaatttgcacctaacacaaatttattatcttgtggttctgaagatcagaagtctgacatgtcttactgggctaaaaataggaatctgtgtggttgtattcctttgtggaaattctcggagagttcccttgttcattcgagttgttggcagaattcagttcctgcaagttgtaggactgagattcccacttccttgctggctgtcagctgaactgttcccagcttctagaagctacccacattcccttattaatagtccccttcctccatcctcaaaggcagcaatggtggatcaagtccatcagtttagtagtcacttaaacctttctcacacctcaattgtctcctcctccttccatttcatctccctaccatggttaggaaagtgtctccacttttaagaactcatgtattttgattgggcccacccaaacaatccagggtaatctctgcatctcaaggtttatacccttaatcatatctgcaaagccccttttgtcatgtaatgtaacgtggttccagggattagggcatggatatctttgggggccactattcttctcatgacaagatttattcttgagaacattccatatacacatataaagaatgtctattctgttggtggtggtggagtgttctgtgggtaactaccagctctagtgggtttactgtttttttcagatcttctatatccttgtggatcttctgcctagttgttctatccattgttgaaagtggagtaatgatgtttccaactataattgttgaattttctatttctcacttcagtttttgcttcatgtatttggatctctgctattaagtgcatatatattcttaattgccatgtcttcttaatagattgaaacttttacaattataaaatgtttttctttgtctcttgtaataatttttgtcttaagagtctatttggtctactgttagtataactagccactccagctcccctttggttactactttcatggattatctttttccatcctattactttcaacctatttgtgtctttgaatgtaaagtatgtctcttatagataacagttgattcattttttaaaatcacaacctctgcattttgattggtatgtttactctatttacatttaatatgatttactgaaaagataggctctacaccttccattttgctatttttatatgtcctacatcttttttgtttttcttttccctcattactgtcttcttttgaattcaattgatattttctagcatatcattttaattcttttgtttgttttaccatatatttttagttattttcttattcttgccctggggattataacattttatcataaaacaatctaatccatatcaatccaacttaatttcaacaatatatttaaagattgcttcaatataggtccatttcctgcccccttcctttgtgttaatattatcgtacaaattacatctttatacattataagcccaacaacccagttttataattactcatttatgtagctatttttaaatcagataggataagaaaagaattacaattaaaaatacattatactgtctttttaattatgtaattaccctgcagtgctctttatttctttgtgtggatgaagttaccatctagtgtcctttcatttcagcctgagagactccttttagtatttcttgtagggaagatctactcatgatgaactctctcatttttcatttatctggacatttcttcttttttttcaaagatacctttgctagatatagaattcttggttgacagtcattttcttacaatacttttaatatgttatcccattgccttcttgcctgaatggttttgataagaagtcagttgttaatcttattgaggaatttgaagctagagtgtatatgctgagttatttttcttttgtagctttcgagattctctttttgtcattggcttttgatagtttgactctgatgtatctaggtatggatttctttgtttttataccacttgtagttcgttgaatttcttgagcatgtaaattaatgttcttcatcaaatttgggaagtttatggcaattatttcttcaaatattctttctgcccctttatctcctcttcttttgggattctcattatatacatattggtatgctctctgaggctctgttcatttttcttcattcttttgactttctgttccctggattgtataatctcaattgacccatattcaacttactgaatcttttttctgcctgctcaaattggctgttaagcccctctggttaataattttttatttcagttgcactttcaacccagaattttatttttttcccttttttatataattttctatctctttattgatatgctgtatttggtaagacatcattgtcatgctttttaacattctttaaacatgttttcctttagttgtttaaacatgtttttaagacgtgttctaaaatctttgatagtaagtccaatgtctgggcttcctcaagaaaaagtttctaatggcagctttttccctgtgaataggtcacacattttgtttctttgtatttctcatatttttttcttaaaaactgaatgttttaaataaaataatgtggcatctccaaaaatcagacctcacccctcttcacaatttgttgttgcttctgtttgttgttgttgccgatgctgctgtttctctgtttcgtgaatttcctggactaagttttaatgtatactttttgtcatgtgtagccaccgaagtctttcctcagtttagttgtccattaatttttggacagagatttctttacattccttgcacaactaaatctacctacctttgctgggaagctttgtttgtgttgagccatgccttcgatgcttcagcaagcagctgacaactctgcctcagagtttacttcctgcttgcacagagcctcaaagccaaacaaaagttaagctctagttagatctgtcttggacatgtgtacaaccctgcacgtgcacatggccttctaggttcttaagaatatgtcagagtttttccaaagcctctatgaatacctcattccccagtttttccttgtaactgttttggtcagcctcttattagccccaactggtactgccatctcaggcagttgcaatgtcaaacaatttttgctgattgtttttgacagattccctcaggatagggctgttcacacagactaagctccaaaccatgttaagcaaagacaatccctgggaatgtgccttttccagggagctgtcagacagatcaaatagtaacaactttctgaggatgggatttttggagagctctaaacctattctgtcctccccagtggctaccaggctgctggttttcacagctgtcatggttgtgagaatgttaattgtgtgtgtgtgtgtgtgtgtgtgtgtgtaaagacagaggttgtctctgtgttgtccagactggtctcaaactcatggacttaagcaatcctcccatctcagcctcccaaagtgctaggattataggagtgagccaccatgcctagctgagaacatttatgttcaagtctatcatagagcttggaaaagaagactacgaataaggcaaattaaaacaccacaaaatttgctattcttactgagattcagctgtgtttcttgaataaatctaacttggattgctgaaagcctttggttaatttccaggactctgaaaatgttaattttgacatttttgccagtgctctcattgttgttaaggaaggattttcagaagtccttattctgacattctgcaagtgtttctcttggtttgagttttcatgtgattgtttggggtagttgtttttatttttgttgttgtcttgattggtttttggagagatggttttctactggatactcctaggattcttttctttgaaggcaaacattcattttgttaggatctgtcatctcagcattgacttctctaaatcaatttacccttcagtcagaaaattcaagtcttcctttatttcaggaaagttgttctgaatattgagtctaagtttttttctattccatagttcaggtttcctaaccaggggacagaatgtcctcccctgcactgaatggcctctgcctttgtttactgaagactgcctgagtatcacttgcaatttaaaacagggcctgtctgtagagccttctctgtacccaggacagtttagaggcgtgtctgtgtttccacaccaacagtaattatagtaataatgattactacaaggtgagcatctaatgctttgaaatctgatatcatttaatgaccccagctaccctgtgaggtgggtattatcttcatttgcagatgaagatactgcagcttagtcagcagactaagtcacctaaatgctctgtcagaagcggaatttgtactcaggaatggccaactgcaaagtccatgtgcttgaacagtatggcatactgatacatgcacctgccatgaccagaacacaatacagtgatctggcagcacttcgtggctcaccatctctgctatactgataacaacttgagggctggacctacttatcttattcaacaaggaccctctcagaggttagggttgcccagtgcaaagatagcaagtcatgtgacacatgggccacctcacccctcctgcagccattgataactttcttctttgaacatggcattctttcgctctaagcccagttaagaattcagaatccttctaggcccagtttttaaagcagccaccaccaatctattggtgctgacatgaattcaaaagatactttctatcccttatctaaatagttcataagatgatgaggctgaactatggaacaaatgtagtccatcagagatttctagaaaaaaaaaacaactctcaatagtcctagaagtttggaaatgagtattaatcccaggataatccagacacatcttgtcttatggcctgatgccaagtgatgtggcccttatctaatagcacatttgcattttaaatgagtaaagctggttaaacctctttttctaatttcagctattattttatctacaagggcctcatagacattcactccacccaacaaccacagaatatacattcttcctatctgtacacagaacatattctcagatcaaccatatgctgagtcataaagcaagtctcaataaattttaaaaaattgaaattataccaaacacactcttggaccacagtgcgataaaaatagaaactaatatcaagaagatctctcaaaactacacaaatacatggatattaaacaactttttcctgattaactcctaggtgaaaatcaaaattaaggcagaaataaaaaaatctttgaaagtaatgaaaatggagatacaacttaacaaagtctctgggatacagccaaagcagtgttaagaggaaagtttataacgttaaatgccttcaccaagaagttaaaacaatctcaaattaacagtctaagtttgcacctagaagaactagagaaaaagagcaaaccaaccccaaagctagcagaagaaaataaataactaaaattaaagaagaacttaatgaaattgagatgcaaaaatccatacaaaagataaatgaaaccaaaagttgattttcaaaaaaataaacaagactgagagaccactagctagattaacaaagaaaaaagaatttccaaataagtactgtcagaaatgacaaagatattacaattcatcttcatttgcagatgaagatactgcagcttagtcagcagactaagtcacctaaatgctctgccagaagcagaatttgtactcaggaatgtccaactgcaaagtccatgtgcttgaacagtatggcatactgatacatgcagaaatacaaaagatcctcagaaaatactgtgagtaattctatgcacacaaattagaaaatctagaggaaatggataaattcctgggaacatacaatctcccaagattgaatcaggaagagactgataccctgactagaccaatatcaagctctgaaattaaaccaataataaaaaacctaccaacgacaacaacaaaaagccctggactagatggattcacagctaaattctatcagacatacaaagaactggtaccaatcctactgattaaacctctttaggttctgctttttgtattgttaaaatcttcatttttggttttctaacggtctctgattcaaacattcgttaccaataaacaatccaggtagcctcaccctgagtggcagcctggctgggtgagttctaaaaatgcccaagacctccaagactaggtgagatctgaagtaatgaaatgcctccattcactaaaggcctgaaattgtcctgactgcctcagtcccacggaccaagaagagcctttcaagctgtgatcccaatacttgtggctgctgtgagaataaggaaagcagcctaggcctccagtggaaggatcagatgtttgcccttcatacctcagagagccttcatccaagtaagatgggtggtgaggagctgtggatgacagcatgaaggatgaggactgatgcagcagccataattagattataggtttccatgggatgtgccatgactgcttacaaatggggcccagccatggaattgagttatcaactaagctgattcctgaggcacagatcatcctgtcctccacaacatgattaaagactacatgatgctcaggaagacctctgcagctgtgtgcttggaagagtgtgtttttcctgctaaagcataagaaaaaagagaccagcaattattatcttaggccttgcagcatcctttctggtcccacaagtttgagaaggcaggtgtgtgtgtgtgtgtgtgcatttgtgtttgtgtgtgtgtgcacgtccacatgcatgcatgatcctacaatggaagtgagtacgcaaaagttgattgcctatataccctccccacaaccaggtgtataagagtgttctttgagaatgagaaagcaggaaggagcacatcccacaccttagcattcatgtagtcaattaggaactcctgagctcccatgacatgctagaccctgggctcagcactggatctcagacatgtcccaaactgggcgatggaagtggtgggaagcaaccactcatggacagcttcccgtgtgccaggagtgtgccagcattgacattatgccgtctctcactcctgccctccatcacattagtgattctgccatgagtgactcgttcctttgggttcctgttaagttcctgtggaggggtctagccacagcaggggaaagagcaccgagggagcttttaggaaactctgctccaggtcagctgtgtgatgctgaaaaaatggctcaccctctctggacctgtttcctcttttgcacaataagagggtggtgttctccaaggtctccttgaagatccgacttatccttggtcatcactttgcagagggcaggtcctgtccccaagcccaccagagtggagctgggaaaagttccatggtgaagaaaaggcaggggacacaactctgagagtcattcctttgaagattgagcccagagggctcagtttctggattgcatggggcactttgtctctctctgctggagccacgcacccctggtgcagtagtttctgccctgcccagactctggtcccagaaggttgacataatgaggaaggaatgagcttgccagctctgccatgaccagcaggctgccttgggcaagtgcttcacttccctgagcctcacttcctctgcctcatcccttctcagagaccactcctcatttaccatcctaaagtctgacccgtcctgacaaccattattctctctccatcccctggtttttctctttaggacagttactgcattctctatctcttgttgtttcttaggtggaggaggtacctgcctcctccctacctagaacgtgagcctagtaaagggatgggcctcacctgtttcaggtttgacctccaatgcccgtcacgtagaagctcaacaccatttccaatgccagaagtgacaggacaacagcaacaatagcaatatttctgtaccactcccctcactttccaaagagaagtaattcccagcttggaccttcccttgctgggaggggtgcccaggtgtggcctctctgtgaccttggaccctggctccggcatatgccagcctggcctttccccagggtagggagctggcaccctgggcattccccagccagcatccagccttcttgggcagggcctttccacaccattcctcccaaatcctcactggcccaccctggaacaaatgcaggcggaagctcgcatccccacctctgctgtttctgctgggtccccaaagagctttctttagggaaaaagaaagcaggccagtgcctgctccttttagaccccacagtggggcatggggtgggccttggttggccttaattttccattcacctgaggagtggctcaatctcactcattcccattgcaggtggatgtcagccaaactggatgcataaggtttttgtgatttaggagttgcaacaggggagataaaacgcctaggaatgtcttcagttggaaaaaaggggcacgatcctcacattctgtaacctgagcactttatctcctctctccccttccttcactgatacaagaaaggagactccagcactagtttcctcagtccttctgcagggcgggccttctcacggcctcaaagtcatggagaagagtgtgcacaggacacctcactttaagcaaagcccatagaccgtatttgagaaaaggagttaaataaagaggcagccaccaacaaaccagagccctgtggtcactcaggtcccatagactctagaggtcaaagggcctccgagcatttgagaatcagagagggcaagtaacttggctgatatcacatagcacgaaggtggcagagccaggattccacctgctggcctcccagatgtctttcctgttggaccctgcttgctggccactcctggtgggggtcactccaccattagtgtgttcatcaaactgacagttgtggtccagatcccttgcctctggtgtgcccagcaccttagctggcacctccctcagcaaacccagccttcgccatcctcccaagcatacttcccagggctgttttgtccattacggtcccagaatataaggcctttgggttttttcagggcctgtgaaaaggtttgaaaaatgaaaaacacactggcagttccaaaattctcaaataaaactgtagaaatgccttaggaattaaatatgtaataagatgtgaacacttcattacacacctacaattagtcacatgcctacgatatgtgaataatgtcaggtcagctagtgaactgttatacagtaattgcgcatcacttatatagatatacacaaagtgcacttactgacttggatgtgtgtgttcattgtttgaagtggcgtggatggaggctccaaaagataaaagaatgtaggggaggtgactcttcaaatggccctcacccaccccttaccctcagctcacccaccatgaagcttccccttccaaggaggacacacctcctttcctagaacattcttcagtgccacaagctgctcagtcagccctgattctggagtctccagtgagcgaggcctggggtggccccagtgggatgagccacactccccacagcactcagcctggatgtggcactggctgcacatagcaagaggcagctattggacacctgctcgccacatgttctgtcttatcctcccagcaacaccgagtgagggagggagtgttaacccaccattcaccaggtttaccagagaccaagcccaggatctctccactgcacacttttaaaagggtcctttcagcttcccattaaagaagtttgttcctttgttcctcctctcctgttcttcctaagacatcatcactgaaatttaagcttataaatttaaaatgaagtaaatctataagggaaaagcattaaaaaagagagaaagatggcttactaatggatgagagtccaacacatttctggaagacaaggttcatgagaggcctagcactgtggctcccacctgtaatcccagcactttgggaggctgaggcaggaggatcgcttgaggacaggaattgaagcctgcagtgagttaccgtcacaccaccctactccagcctaggcaacaaagcgagaccccatctcttagaaaagaaaaaagaagattcacaagagggtgtggcaatattagacaggctaagcccccaggtgtacccagtgtaaccacaggggcccttcggtggaagggagaagcagaagaggtcagagtgaagccacacctgctgtgacaatggagggagaaagtggctggccaaggaactccatcagcttctagaagctggaaaaggcaaggaaacagtctccacccggagccttatgggaacacagccgcctcatgggaacacagctgccctgtgacactgattttagccccgtgaggcccatgctggacttctggcctccagaactgtaagatttgtggtgctctaagcaaatcataaatttgtggaaatttgttacagcagcaacagaaaactagcacaggcagcctacgtgctaattctcatcttacctgaggtggggagtacaatacaccctgcgttagttggaaagctgaaacaattctctaatgctaatactgaaattgtcaggtcggtgtaactgtgacagtccggaagcaatggaggcttcagtgagcaggaccagctgcctttctcaccaccacagcttgatctctctcacaacttcctctccacctccactgacctctgggttggttttctcctgcacgatctttccacgtgtcaggggcctggaggcaccctacaagagctgattttacatttccttcctagaggtaatcccagaacaaaagagagcagttttatttatttttttcaagagaattaaattgtttattgattacacatgataatggatgatacacaagcttcattcccatctataatttaatctggtaccattattcaattagatatgttacataggatgtgccaacaattacttttataaccaataattccatgattttgcttgggtaatcccttttaatggtgactgaaatcatgactgaccgagtcagtggctagaaaaggggctttgcctttgtaacttttgatgaccatgactccgttgataagattgtcattcagaaataccatactgtgaatgaccacaactgtgaagttaggaaagccctgtcaaagcaagagatggctagtgcttcatccagccaaagaggtcgaagtggttctggaaactttggtggtggtcgtggaggtggtttcagtgggaatgacaactttggtattggaggaaacttcagtggtcttggtggctttggtggcagtcgtggtggtggtggatatggtggcagtggggatggctgtaatggatttggtaatgatggaagcaattttggaggtggtggaagctacaatgattttggcaattacaacaatgagtcttcaaattttggacccatgaagggaggaaattttggaggcagaagctctggcccctgtggcaatggaggcctatactttgcaaaaccatgaaaccaaggtggctattggcagttccagcagcagcagtagctatggcagtggcagattttaattaggaaacaaagcttagcaggagaggagagccagagaaatgacagggaatctacaggttacgacagatttgtgaactcagccaagcacagtggtggcagggcctagctgctacaaagaagacatgttttagacaaatactcatgtgtatgggcaaaaatctcgaggactgtatttgtgactaactgtataacaggttattttagtttctgttctgtgggaagtgtaaagcattccagctaagggttttaatataggttttttttttgcacccatgctgttgattgctaaatgtaatagtctgatcatgacgctgaataaatgtcttttgttttaatgtgctgtgtaaagttagtttactctgaagctatcttggtaaatttccccaacagtgtgaagttagaattccttcagggtgatgccaagttctatttggaatttatatacaacctgcttgggtggagaagccattgtcttcagaaacctttgttgtagttgaactgatagttactgttgtgacctgaagagagcagttttagtagtgaaagtcctgcaggattcctagtggtcaagattggggagcatgcctgtatcccacagtggccagggcccaggacatatgcctggccctgtgactggctggtcatgggcacaggcccccgggagggaggggagagtcctttcagaagaaggggagggtatgggaacagacccaacctgaccgccccagaccgttactctccctgaggtggatggaatgcagaatcaaagtacaattatatggtttaaagttttaaaagtaaataacagaaaactaaaaataattatgccaaaatgataaaactttggaaggatgaagggaggaagcagaggtgcataatgaggccatttcttatgttccgtcacaggaggtagataaattttctccagatgaataaaaaaataagggtgcctatacatgctactaagcattgtggaggcgcccaccagaagtactaaaaatggaaatgtttacaagaagttgcctctggagagtgaggccaggactggggaggggagaggatagaaactgttttctctcaccataaacccttctctcatatttgatttgttcctatctgtttgttttacattgatcacaagatgtgctgtgagagtgaaagatttttaaatatttagatggatgtcctgagctttgatatgaaatgctgatctgatcaatatctaatatgataactccatttgggataaaattttagggtcatggggaaaaaacataatttggaatcatcttcattcatatgcaagttatgctttttaagaaggaaactccttgattctcatctgctgtgctgaatctttaggagtttaacctgctatgtcacatgtttcaataaaagagagatgttcccagcctgttaaacaacaaactcgcctgcttaaatcaaaaagcaattatgaatgaatgattgaactcttgtcatcaccctctctccaggagagagtaaggcacattcattctcacaagaagacctggcctcaccccatttctctgtttcccaggcatatggctcatctgcgtccagtgtatgtttggccaggacactggacatgtcccacttggctcctgcctcttgcccctgccagtctggcctacagccgtgggtctgaggggaggactgggagccatcagagacagcagctggccaggatctgatttggaggcctagtactcaatgcagagttactcttcaggccccagctccttcatgcagggctcctgggccacatattcagagtcagattccccacccttctccagggattcgggtcattgacttacaccaaagctggaagccataaatcaggagacttcattggtctcattcctgaacccacccctgcaacctttggtcatcgccccataggccagccctggccatccacccatctccctgatgctccctccatcctgctctgggactcctctccttcctgctcttccgccacggctgactctgcctcttcgtcactgttccactgggaggcccatttcagagcaaatgaaccctctgtgtcatcagcctttctctcctcccctgggggcatactcctttgccctagatgggggcttctcactctcccacttccaacttggctaaggacccagcaggacagggagcctcttcctcttcccctttgccctcctcccacatcccatcgtctttcgctctctggaggttggggggaggggcagggtggaacaattcccccagcttctcactcccagggcctcccctccatgatcaccgtctccctctcctccctgaggccggaggcctggccatgcccgtagggacaacgtctccccagcttggccttggtgctctgggacctccccaactgcacaacaggctcccaagccgggaatgcttttgtctcagctcccctctagacctggggagccctccatggaaaaccacagtcgaaaaatggatttagtatctgcattgttcagggtcatggcaagaaatggcattgaatgcttcaaatgatgagactttaatggcagtagtccttacagaagtgtggccaggtgaagaggatgaacagggatgttgagaagcacgaaaacaaacaactctaggatgctgttactcatggggctagacagagaggaatagtgttgccacagccagtaagagctagagatgtggagaaggggtttccagcaggagctgatgtcttggagagacacagccttggggaggggcagtggggacggggtggggggatacactgaccactctctctcttcctatacttttgccttccagctagagtctcccactggctaattccaacctctgcccagtcagtaagaaagcctgagaggcagcttaaagacgtcaggttcccagggtcaagcaggacacatggctgtgggggtggggaaggagagtgggcaaacaccctgaaactaaaaggagagtagcagtgcagaatccagggccactgaaaacagttcccagagtccaactccgtcgttttgcaaatggagaagccaaggctggaaaaggttagtgattttcccaagtcacacaaagttcgtggccaggctgagcccagaccccagatccccatcccccctgctgcctgtgacacaacaaaggccttgacaccaacactcccttctgtggagtcccttgtagtgtttatgcactaaaaatcatttttaaaacattttaatagggtatattgctttgaatcccttccccaacaggaaatatgctggctggctggcagaaggctcagcagctgaccttgaactcccttgacctccccacatccaggctgagattttccatccaacggtattgccagagcccaagctgaatggaggaggctggaattaaacagtaatagccccttccagttatcgttctgtagccggcagctagataaatattcggaaaacatcggaggagaaatctaattgaattcaaacataataaattgaagccaactcactggatttatggtcatgtcttctggcatcttttaattttgcatcacactcatttggaggcaatcaaattagggcgctcattagcagccaagggaggggaggctggagccacactcactgcggtaatgagatctctgcagtgggatgattcagaagtcggttgccggggaggctgcaagggcacagtggtcactgcctcctttcaggaaagttgttgggaggagcaggaggttgattgtaggagggagcaagggtggagtccagcccagctactcaccgggtaactgtggccttcaccgcccacagtgtcagactcctcctcggtgggatagcggcagtgcctgcctccgaaggctaaatgagtaggaaatgagataagaggtagaaaccatgtcttcctccagccctcagagtttgataacctctgccctctcatcccattacggccccatggacaaagctccttggcccccgattctcactcatggacctctggcttgtacatgtgagaaacaaacttacccgtccaaacccaaagaatggactcagatacccagagaacagcgaaagtgaaacttttaatgatgaacttgcaagatcgggtgtctgatggacaagcacacccagcagtttcgacaagcagtttatccctagagtacgggtccctcccccagttgctcatagactgagtactatggggtcacaattttcccggatgttgcctattgattgttaggtaggggctttaggtgtttttttttagggttgtcttgctgcattttgttgcagctcacaatgcattgcaatcctagtcagctcaggggctcttcaagtgtttgacttatgacctaagtagctaggcaggctgacaagaagagacaaatcaagctatcttgcagactaataaacttttatctaaacttctttggttcgggtgagggcaactaagggggtggggaagagggaagaagggggaggccgacaagcaggcagcagctatccaagcaggggcctagtatgtcctgttgcttctatagtttgctgacctaagccgattcaaggcacttggtcttggaaatggaccactgtatacattatttccttcagacacccaccgtggacacaatgctcagctcatcctggcagcctggcgagatatggccttgccgctagagccgttccaggcatccctaccccagaccaggggactggtccaagagacctgagctggaacctgagaaggacatccaggcagcagccaaataggtgcctggtgcaaacaggtgttcaggaaacacgggctttctcatccaccccagtccctgcacagggccgaggaggaggagggcaggcagctttcttgtctggcacaatcattcacttatcgaatacctcatatgcctgtggtgccaggcggggtgcagaatgttatcccattccatcctcactgaccataagggaagtatgaacacgtttcactttgtagatgaggaaactgagtcccagtgagaataggcatttgctcatggccacacagcaggtaagagatggagtcagcagtcaaacccaggtctgactgactccagagcctgcgcactctctgacaagcagctccacagaaccgtggctgcccaagcaggtgactccacaaagagcctggagcctctgggacctggacagggaagtagattgcagccttgtgagagttacatcatgtgatgagggctttctgatcccacagtctacagagggaaccacagctggagctgagcaaagccagctcatccaggcaggggctccagtgagtgcgccctgctgctcgccaggtggtcagccttccagcttccccagggactacctacatgtccccccaatgcttactgcccactcccaggaggggctgcgtgtcagagcaggccagagcaccagatgccctgtaagggtgtgtctctgtgtgtttgtgtatgtgagtgtgcacacacatgcatgtggaaatgtgcgtgggtgtgtatacacttgtgtgcatgcacaggactgtgtgtgcttataagtgtgtgtctctgtgagtgtgtgagagtgtgtgtgtgtaagtgtgtgaggtaggccaagcaattccaatcacttgttttctgaaatgtcctcagatccacccaggtgaaaggagctgataaatatgtcattataatcacattttctactgttaaaatacagtcctgattatatttgcaatgacgacagtttactttacccaacacagtaggtgattcaattaaacctctccccatctatccttgggcagccagacaggccagcctttccagccacagggagaagagaaggcaaaggtgacactcccatggccgcgtactctctcatcacattcttgatgcttcccctgtcttggttttttgaggcccccagggcttggccaggtgtctgctcattaacatattaggcctgagttcaaatcatgagccccatgagcagaaatgcactccaggccccctccccactccacagagcagtgcacctgaagcacagacctgactgagtgaagaaagtcttgacagtaaccacctgatgttagcacagatgccacagacttagggccctgcaggatgccagctgcattcccagtgcacccacacttccaatcactggctaccaagatagaggctcccactcagggcttcaagttgaataaataattcattagaatgactcaccaacctctgcacttacaattccagttttattgattggtacaaatcaggacaagctaaatgaaaagatgcacagggagaggtttggggagattcccaaatgtgaagcctcccagaacacggttatatgattaccaaccagggtggctgcactgagctacaatgtccagagtttttattggggtttgttacctaggcatgattgatgaaatcattgcttacacctttgtactcaattccaatacccactctctccccagaggtcaggctgatatcatgtggctcaaagtcctgaccctttattcacatggctggtcttgccatggttggccagcctgcatcctgaagctatggagtcccaccttgaagcacctggtcagcataaactccggtgtggccccagggacccacgatgaatagcaaagacactcctgccaccctgaaaatgccaagctcccttccaggaacctgggacaaagcccaaatgcttcattttacaacaccatgggccccctaaagtgtctggtggctcttcattgccttctgggtaaatccaggcttcagccttgcctagaaagccccttcctccttgtctgccctcatctcccagctctctggccaggtgccttttgttccagccacactggccttcttcactttccagacataccaggtcctttcccatacctttggggtgatatcctccccatcctttcccctttcttaatgcttccactgtcttgacatatgtgacatctgctcacctcttcatctccctaatgaggctatgagcacccaaaggcaccctcaaggcccacacattttagctgtcctggaagacctgaagccacacagtgcaagttctgcagagactgtgccattcagaatccctgaggcccttggctgggagccatattagtggtccttccctggcctacagagaggctgcaccattctcgagtcctaagcatggcatggccacagtacttgcattcacctttatctctgatcatgaagttgagcaagcagctgactcaagggccaatgatcctgccaaggtcttcctacaggtgttcccagcaggcctgctagccaggggtgtggcgccacaggtgcttatcatgggcccactgcaggatggctggtccccaagcagccccacccagagaagcttccaccatgatcctgaggcaatgcctaaggcctctggagaatgaggtgactatcactgttgggggggcatgatcaacacagggtgcaagtcagtttcttgggtgcttacaatgttcaattattgaatctgagtgcgggtgacatggttcccttggcaaagattaatcgaaccatataattataatttgtatatttttgtatatgtctgttcacttcagtaaaaatttacgtaaaatgtactattacaaaaaaagctactcttgccccagcttcttagcatatgcataaagcaatgctcagaaagcatcttactgatcatgagagttcccccaaggtgtttataattggttctcagagaaatgctggctccctccttctgtccccttagctgaagcaggctgtgcatgatacagccagaggagggaggccatcagtgttctgccagagttatttgaatttaagcccctgcactctagaattcttgaggctacccaaagcttcatggagctcatgatgagattcaaggtgcagattcctattttggcatctaaatcaagtgaggacacatttatgcaaggaccttaggcatccatatcagtcacaataaacagtttttgaaataattttaattattttcaaataatgcataataacctcaaaacctagtggcttaaaacaataatttgtcaccatctttcacagttgaaggagttggcttggctaagccaggcagttgttgtgtggggtctctccctgggttagtcagatggcgtctgagtcatccaaaggcccgacagggctggacatcccaagtggcttcctcacatagctggcagctgggaaccgagtgagggctgtggtctgcaggcctaggcacagctcctccatgtggcttgggccttctcacagcatggcatctggatcagaaaggcaggaagtggaagctgacagcctcttagccctgagcttagaagcgggcacagcaccatatgcctcactctatgggtcagagaagtcatagagctcacctagattccaggggatgggacagagaccccacctctcaaggtgagctctctaactgggaaatccgtgaccatgactttgaagtgaggttggatccaggagtccaagcaaggtcctgaactttccctccccgtctctggcctctgcagggctctgttgggctccagcttcagacacagtctccccaggagacagctatggtgctcagcaggtccaagctcagactccttagagcacatgccgaaggagagacaactgctctcccagcactcagtttcctaacaatggaccctagttggccctgctgtccacgtgctgatcccaacctaataagcacatccaatgtgtgacacactctggccaatgtgggtcctctgactgcccttgtggtgggcagtggggggctctctttattattacccccaccacaatcacatagaaagtttgtaaagaggattccttttctcaaagcagggaaccacagagctcatactgtaccccaagtcccctgcaacgttacctacaggtcatgcaaccagcattaagttacaaagagaaaggtgggtacatctggaactccctaggcctccttttccagtctctacctcgggatgtccagctgtcactccacccccatgttctccccctaccctctgggcctccaaggccacctacctcccagcctttcctgcctccttctccagaaggccaactgcttccactggccacttcagatgggctcatcccccggccctcccccagccctcacccttctcttgagttctgacaggataacatcgttgatatgatttggctgtgtccccacccaaaacctcatcttgaattacgatccccataatccctacgtgttaaagttaggactagatagatggaggtaattggataatgggggcggtttcccccatgctgttctcatgatagtgagtgagtctcgtgagatctgatggctttataagtgcccagcatttctcctgctaacactcattctctctcctgctgccctgtgaagaactgtgagtctattaaacctcttttctttagaaattacccagtcttgggtgtttcttcatagcagcatgaaaaaggactaatacaactggcttctagggttagccggggagtacctccggcatagactgggggccacatggactcaacatcagaccacaggcctgttagaggaggaggcgaagccatcagtggaaggcacacgagggatctgagtccttttcctccctgcctgtctgtggcccagggagccagtggtggagatgacacttttttttttttgagacagaacctcactctatcttccaggctggagtgcagtggctcgatctcggctgactgcaacctccacctcccaggtttaaatgattttcctgcctcagcctcccacatagctgggattacaggcgtgcaccacctcatctggctaatttttgtatttttagtggagacggggttttgccatgttgcccaggcttgtctcaaactcctgatttcaagtgctctgccggcctcggcttcccaaagtgttgggattacaggcatgaaccaccacgccgagctggagatgccacttctaaggtgtccttaggtttcagaggccatgcaggcgaatggagggacagtcatggtgttctgtcttttgttatggaatagttattattaaaatcctggagtgggttgaattgtggcccccacaaaaggttggtctgggtccaaactcctggatcctgtgactataaccttatttggataaaacggctttgtagatgtaattaaattaaggatcttcgggtaagttcatcctgactttgccatttttaattaagttgtttgtcttcttattattgaattgcaggagtaatttttacatttttgataccagtactttgttagatataagtttgagtactcagtccttgtaagagacagaaaaggagagacacacacagaggagaaggctatgggaggctggaggcagagatcagagccacgagccaagcttggagctactggaagcaggaaagcaaagaagaaccttgcctggagcctaagtagggagcacagccctgtgacactgtgatttcggacttctgacttccagaaccgtgagataataaatttctgttcttttaaaccatgaagtttgtggcaatttgttacggcagccctaagaaaataatacaaatcttctttcactgtcaaaagtgcctgggttggaatctattgtaaggactcccagagcgctctcgggaaaggaaacaagaagccggtcccctaggcctgggcctgactgaggccgggaccagaggctcaggtggggccctggaggccagcaggaggtcccagcccagtcaccagtacaggagattgacaggaatgaaagaaaatgttttgaggggtgtgccttaggtcacgggtccccagcagccagcagcatccggaggctagctggggtcctgggtcctggccatctctagtcctcagagacacaactgacgtgtgtgttggtccatcctcaggctcacagccctgaaatctctctcctctgagacagaaaaggaagttcatgtcagaatcggagcacagagagatcatgaataagctgatgtcagtggcccactcactgccaaccttgctcagctctgagcatgattatacccaatcaaagcctggaaaatcaatgaatctgcagcccaggatactgggtactacatccacagcccaaagagcctctccggggaaggttgctgagatactaagggaaggatactttggaaagatggagaagtaaaaatatttcctacatcctttgttttggagagactatacctgtatctgggatgcacaggtgagttcaaacaccaaggcgtttgtggatggtgcccaggctatactcgaagcagagccgtctccttccctgagtgccctgctcctgaatgaccaactgcaggaggtggtgtcaggccctgggctgtgcgaggaagggaaggtaagacgcagtgagccagggaaggacacaggacagggctcattgaagccctaccctacagtgatacaaaactgctgcacaagctggtccccagagagcaacagaggaagacttaggaggcagagagactgggaacgccagtggggatgggagggaagtctccagcctgaaaaagaaaatggccaatggaagaaactaggaaataaaacatggttgcgagtagggtattccctacttcttcgtatgagtctgggttctaggaggtgaatatgcatacagtcacatgctgtgtgacacttcagtcaactacagacggtgatcccattaaattataatggagctgaaagaatcttatcgcctggcaacaacctagtgcaatgtattatttaggtgtttgtggtgatgctggtgtaaacaaacctgcactgccagttgtataaaatctagcacatagaattatgtacagtgcatagtacttgacaatgataacaaatgactgttagcagtttatgtatttactatactatactttcatgattattttacaatgcactccttctacttattaaaaagaaaaagttaatgtaacacatcctcaggcaggttcttcaggagggattccagaacaaggcactctcatcacaggagatgacagctccatgtgcatgacggccccagaagaccatctggtaggacaagatgtggaggtggaacgcagtgatattgataatcctgaccctgggtaggtgtgggctaatgtgtgtgtcttcattttaatttttttctaatttaaaatgtaaaaaaagaaaaaaagcttataggataaggatataaagaaagaaaatatttttgtacagttatacaacgtgtgtcttaagctaagtattaatataaaaaagtcaaaaagttaaaaaaataaagttgataacataaagaagctaaggttcatttattattgaaggaagaaaaaaatttaaaatacatttagtgtagcctaagtttatagtgtttataaaatctgtaatagtgtacaatgatgtcctgggacttcacattcactcaccactcactcactagctcatccagagcaatttccagacctgcaagcttcattcatggtagatgccccacagaggtgcactactttttgtcttctatgctgtattttcactctacccttcctatgtttagctatgtttggatatacaaatattaccatgttacagttgcctgcagtattcagtacagtcacatgctgcacagattggtagcctaggagcaacaggctatgccatagagcccaggtatgtaatgggctgtaccatttaggtttgtgtaagtacactctatgatgttcacacaatgacaaaatcccctaatgatgtgtttctgagaacgcatcactgtcattgagcatcgttgtgtattaatccattttcaagctgctgatagagacatacccaagactgggcaatttacaaaaaaaaaaaaaaagatttaatggacttacagttccaggtggctggggaggcctcacaatcacggcgggaggcaaggaggagcaagtcgcgtcttacatggttagcagcaggcaaagagagagcttgtgcaagggaactcccccttataataccatcacatctcatgaggtttattcactatcatgagaacagcacagtaaagatctgcccccatgattccattgccctccactgggtccctcccacaacacatgggaattcaagatgagatttgggtggggacacagccaaactataccaccatgactgtagtctcttgtgtgggctcctttcactcatcataatgtttctgggctccattctccttgtcatgtgtatctgtaatctctcctgctttaatgttgggtagtgttccattctgcagcaatatcacaatttgcttatccattctactgtctggggtttttccccagtttgaggctactaaaattgttataaatatttgtttataagtccttgtgaacacaggtgtttttattcctcttgaataaataaatacctaggagaggaatttctgttttttttttatttttatgggtacatagtaggtgtatatatttatggagtacatgaggtgttttgatacaggcatgcaatgcgtaataatcacatcagggtaaacaaggtatccatcacctcaagcatttatcatttctttgtgatacaaaaattccaattatacacgcttacttatttttaaatatactaaaaattattgttgactggccaacctgttgtgctatcaaatactgcatcttattcattgtatttaactctacttttgtacccattaaccatctccatttcccaccctccacacccacaaccttttcccagctctggtgaccatcattccactctctatctccatgagttcaatatttttaatttttagctcccacaaatgagtaagaacatgcaaaatttgtgtttctgtgccttttttatttcatttaacattatgtcctctaattccatccatgttgttgtaaatgacaggatcttattcttttttatggctgaatcgtactccatcgtatatatgtaccacagtttctttatccatttgtctattgttgaacaattagagtgatttcaaatcttggctattgtgaatagtgttgcaataaacatggaagtgcagctgtctctttgatatactaatttcctttcttttgggtatttacctaccagtaggattgctggatcatagggtagttctattttcagttgtttggggaacctccatactgttcatcctagtggctgtattaatttacattcccaccaacagtgtataagggttcacttttctccacatcctcaccaacatttgttattgcctttcttggataaaagccactttaaccgggttgacatgagatcccattgtagttttgatttgcatatctctgacaatcaatgatgttgagcaccttttcatatgcctatgtgtcatttgtatgacctcttttgagaagcgtctattcagatattttacccatttttaattatattattagatttcttcctatttagttgtttgagctttgcatagattctggttattgatcagatgggtagtttgcaaatattttctcccattctgtaggctgtctcttcactttgtcatttcctttgctgtgcagctttttaacttgatgtggaaatttctggtttgtatagtaagtatatatttaaattcataagaaacttccaaactgtttttcgaagtgacagcattaatcctgaatttccactaacattgtacaagagttctagttgctcccgattcttacaaaaattcagaattgttgatctttaagttcaggcatcctcatggtgtgaggggtcgtcacatttccctgatgtgtaatgctgcagtgcatctttttatgtgtttattggttgtttcgggaagtgtttgctcaaaattttctgcccattttgataaagttgttttgtcttcttcttactgatcttccagggttctttttaatttttgcataccattactttgccaaatacctgtgtatattttctcctggtctgcaacttgccctttcattttcttcatggtgtcttttgtagaccaaaaacttttaatttcaataaggcccatttatcaatttttttcctcgaaaattttatgtgccctgagaaatctttgcctgcccaagttgtgaagattttctcttatgtttttctctagaagctttacaaatttagcttttatttttgtctgtgatacatttcaagttatggtataggtaagggttgaagttcacttttttcatgtatagatcttcacttgttttagcaccatttattcaaagactatctttttccccatcaaattactttggtaactttgttaggaatcaacatattatgtatgtccagaaacaggacatctgattctgttccactgacgaattgtctaaactgaaacctataccacatgtcttcattactcgctttcctgtaatcttgaaataaagtagataagtcctcaacattcattctttgtaaaaattgctttgattattctagattatttgtacttccatgtagattttggaatcgctttgtcaatttcaaccaaaaatcaggagagctgacttcttaacaatattggcaattcactttgtctccacaatgtttcatagttttttacacagagattttgctcatcttgtaagtattttcaaatggtactatagacagtattatttatataatttaatcttccaaattgccacaatttaggaaaacaactgatcttttgtttactgaccattgtatcttatgaccttgctaaattcgcttattttagtaactttttgtaaattccttaggattttaaagtacattattatttcttctatgaatggattcagttttacctcctcctttcgaatcttatgtcggtatttcctcttaccttattgcaccacctaggacttttggtacaatgttgaatgatcatggcaaaagtggacattcctgcctcactcccaacctgaggaggaaaacattatgtctttcactatcaaatttgataatacctgtaggtttttcatgacagcattttttcaggttgatgaatttcccttctacgccagtgttttaagaggattttatttttttaaaaaaaagtacatcgtgaatgagtattgcatattgtcaaatgcttttataacatctatctagatcatcacctgggttttctgctttaaactgctagaattgcattcattgattggtcaattgcactgattaactttgcatttctaggataagcactcttggtcatagtgtattaccctctacatatattcctagattcaacatactgaaatattttaaggatgtttgcatgtatattcctttttttttttttttttttttttttggagacagagtcttgctctgtctcccagcctggagtgcagtggtacgatctcagctcactgcaacctccacctcccaggttcaagtgattctcctgcctcagcttcctgagtagcggggattacatgcgtacaccaccacacccagctaattttttgtatttttagtagagatggggtttcaccatgttgcccaggctggtcttgaactcctggcctcaagtgatccacccagctcagcctctcaaagtgctgggattacaggcgtgagcatggtgcccagctgcatgtatattccttgtggacattggcctataagatttttttcttgtagtatcttttctctgagtttgatatcaggattatgctgatcccataaattaagttagaaagtctttcctcctcctttactttctgcaagtttgtataaaagtgatactactacttccttaaatatttgattgaattcactagagaagtcactggagcccggaattttccttgtgtgaaggtttttaattacaaagttaatttctttaacggttataaagctattcagattatctattttttcttcactgggctttagtaatttttcttttgaaaaattttcccatttcctctgggttgtcaaatttgttgccgtaaagcttctataatatccccatattatttctttaatctctacatagtctgtaatttttattccctcttttattagtgatgttggtagtttgttttatgactttttattaggagtttatcaattttattgatcttttcaaagaactttttatcttattgactttctttattattcctttttctattacattgttttctgctattaacttgatttcctttcttctacttacattaggtttaattggctcctctttttccaacttctaaaagtaaagcttaaatcattgaccttggactttttatattttctaataaaaatcatttaaagttataaatttgtctctaatcattacaaaaattttgatagtctgtgttctaattcttatttaggaaaaattattttaaaatatcttttgtgattttctctttgatccatgtattatttaaaagcatgttgctcagtttccaaatacttggggattttctagatatccttctgctattaacttctattttagttccactgaatttagataacatgttctatattattttggtcctcttaaatgtataaagttgttttctgccccagatatggtccattataatgaaagttttgtgttcagttggaaacaatgtggattctatgaatatggtgaattgcgttgattgatttattgcgctgttgattaaactgactttgcattcctaggatatagaacactacacctaaaaatctgtatttaggtagaaggttctataggcatcaattaaatcaagttggttagtagtattgttcaagtgtccttcccctttattcattttttctacttgttctataagttactgagaaacaagtatgacaatttgtaaatataagtgtagatttctctacttcccccttcatttctgtccatttctttgtcatattttgaagttctattattaggtgaatatatgtttacaatttttctctttctgataaatttatcattatgaaatgttctcgtttatttcttgttctgcatatttcttgttctgaagtttactttttctgatatttaactagcccctccaactttgttataattggtgctacatggtatatttttttccatcctcttacttttgacctacctgtgcctttaaattattgaggtcttcagacaacatagagttgagtcttgccttattatacagtctaaaaatatttgtctttttattggaatttttagaccattttcattttatataattatcagtatagttgggtataaatctaccatttgtcatttgttctctgtttatttcatctgttcttcatcctttatttctcttttcttgatttcttttagaggaattaaaaatgtttatggttctattttatctccactgtgagttcattagctataactctggcttcatgtttagtggttgcatgagggtatacaatatgtatcattagctcattacaaatatactattataacactttatgtacaatgtaagaccttacaaccatatacttctgtttcctccattctgtccatcatgctatcattacatattttgctttaatatgttataagccacacagtacgttgttattatttttgtttaaacaatcaattatcttttaaggaaatttaaaaatgagaaaagcctttgtatttacccacatacttaccattaagtgtttttcatcctttgtccacttagtatcacttcacattagaaacacctggtgagtcttattatatttgttagtgtgaggaaaataattgaaagtatacacagttacccagctccttgtctcttataaggggttgattaggagtatccagtggtgatatctttattgctagatcatgccatggactattagtgctctctttacaattggaaataaagttattagcaacttaaagtgtaatcagattagagacccaattttggaatagatagatatgattatacttaaatataatatataactatatataattttgtacatatgcataacgtgtgtgtgtgtgtgtgtgtgtgtaaggaattggctcctatgattattgaggctgacaagtcccaaaatctgcagttagtaagctggaaacagcagagccaatggtgtacttccagttcaaaggctggcaggctcaagactcataaaaagctgatacttcagttcaaaaatggcaggaaaaaaaaaaccacctcccagctcaaagcagtcaggcaggatgaaattctctcttacttgcaggagagtcagtctgtctgttctattcagatcttcaatagatttgatgaagcccacccacatttcttagccactggcatttagcaattggattatgttttaccttgcatagttttctttgtgcttatcttgcttttgatctattgagcatcatggatgggtggttttgtatgtttcatcaaatttggagcattttttaccattatttcttcaaatattttttctcttccctctttcctttccttctcagcttccaattacaagtatgtgatccatatacttgcatgaatattttcccacaggttactaaagattcatttaaattttctttttagtctcttttgactgaattttagttttgaaagtttctattgcaactttcaagttcactgatcttttcttcttcacgtctaatctgttcatttcataaagaaatttttttatttaagatttttatttttggcccttgtatttcctttttaatttttctccttctttgatgattactttcatgtttcctttaaattcgtgtgtatatctgtaattggtgttttcaatcctttgtgtgctatttccaacatccatcattcctgagtgtgtttctattgactggtttttctcttggtaggagttgcacttctgtgcatctttacatgtctgtatttcttatatgacaccaaacattgttaattataccttacttaatgctagattttgttgtcctcctctaaagattggtagatatttttctggcagccagctgagttacttagaaattaccctgacccttttgaggtttgttttgaagctttgactgaaggaaaggggttagattagactttatttagggcttctttactcctcctgccaagacatgacttttctgggatctcaactgaacgcaccagattttctacaaggacgctccactctggctggtaggaatgcaggggtcccccccatgtcccacatgagctctgaaagtgcctgctcactgctttccaatcaccctttgcccagcctcctggagtttcatgatagacatccacaacctaatttttataacagatccatggggaaccctgttgtactaatctgttctcacactgctataaagaatgacctgagactgggtaatttatgagttaaagaggtttagttgactcacagttccacaggctgtacaggaagcatggttggggaagcctcagaaaacttaaaatcatggaagaaggggaagagaaagcaaacacatccttcacatggcggagcaggaggggaagtggtaatctcatgagaactcactcactatcacaagaacagcaagggggaaatctgcccccatgatctaatcatctccccccaggcctctcctccaacactaaagaccacaattcaacaggagatttgggtagggacatagagccaagccatatcaactgtacagatttctggatatttttctgtacattactccctcctctcaaaactgctgcattggggattaagtttccaacacataaactttgtgggacacatgcaaccatagcaattcccttccagggaggttctgcaaagaggcctgccactgattcctcattgcatggagatgagatctcccttattctgcaaggccatgtggtttttccatctctttctaatctgagtgttcaggtaaaagtccatacctgctaacaggggcaagcaggtgctaaaaactagtgaaaaaactagtgaagagggcccaactaactgaagagtagcatgcccacccaaagggtcagctgtgaccaagatcccacaaaggtagccatgcacaaatgcaggccagggctgcttgacttcagattcttcaaaagaagctgcaagtcacaatttttacatgaaatgtcctgtgtgttaaaagttagcaactgtgggccaggctcggtggctcatgcccgttatcccagcactttgggaagccgaggagggtggatcacaaggtcaggagttcaagaccaacctggccaatatggtgaaaccctgtctctactaaaaatacaaaaattagctgggcttggtggcacatgcctgtaatctcagctactcggaaggctgaggcaggagaattgcctgaacccgggaggcggaggttgcagtgagctgaagtcatgccactgcactccagcctaggtgaaaaagggagactctgtctcaaaaaataaaaaaaaagttagcaactgtggaggacaaacaaaatgctgaccctgtcttcagacttctccttggatggaagggtggcagacccaaagcctttggcttaagaaatctccccagggccaggtcctaacaaaacgtggcttctcccatgatgtcccccatgtgtcaatgctaaaccgaccctctggctctgacaattcaaagtcaactcaacaaatgcttactaagcatttgctgcctgacaggctctggccttgatgttgggaataagactggaccggtcactcatatctctgccctcagagatgtgacctcagagattaaacctctagtgtttactagaggttaaacactagtgaggaggcagatattagcccaaccatcgcaagaatacatgactacaaactgagataaatattaggaagaaaaattggaggaaactaagagagtttattacagcagattttactggctatgatatttgaactgaatgttgaaggatggatagcattcaaataattaaagagattggatgagattgagagtaaagctttccataaagtgagcacagtacgtgcaaaggccctgaggcagagcagagtgtaggcattctacaaactcaaaggccagtgtggctggagtgcagggagaaagagagaaagtgcacacaggtcttctaacacctaaaaaaaatgtgttagccacctcgttttccccagtgtagccagaaatgcattggtaaggaaagacccaggttaaagcaagcccgagtgtgtgaccaccctctgcatggtggctcctgtcctgctacccattccaggaggacacagcaaaaccaggggccacatctttgattctgtaacttgcatcacaggtcctccaaatacagctccttccccatcagtccctggatacttctaagttcatttcctgatcaatttccctctggcctatacatcttaaccattgaggatgttgtcttgctctcggcctggtccgtctgtgtttgccacttactgtgtgtcccctcagggcccagaccagagccacagacatgggctggacccctccctagtgggtgaagagccctggtgtcatcatccaggaagaggctgatcctcccaaggaaatgggaccagagggaggggaactcaggctgtccctctctggagctgacgtaggcccatcttcaccctggttttgacttgagtttagatttgtctgaggccaggaaggttagtgaggcagcagcgggtgggcaaagagacccttacccagtgaagacaactggggtgaggccgcctcagggtaaggccctctgaagaggagaggggttttcccgtgagcccataacatcgagtcacctgctgcctcctgattcagtcaacattgctgagtgtctgcagctgagcccactctctgtgctggcactggaatcctaggtgacaaaatgcccaggccctgttctgaggaagcagatgcccctgaggaagtggacaacagtccagcaaccccatgtggcagtggaagcacaagtgagggcatggctatgcccaggaattctctgaaccacaagagggtcgaactcagggcctgagccagtcttgggggtcagcaagagcatcccagagggagtgacatagaagctctccactccaggctagctgggagttgtaggccaggtggagtacattccaggcagaggaaactgcagatacaaaatcctgggagcaggagagagtgcagagagtttaaggaagaaagaagtcacatgaagcgagatggggctgcaggagaaggaacctgtacaaggacagactgaggagggttgaggggtgggggtgggtggggcccaggctgtcaggagatgtattagctcattctcacactgctaataaagacatatccaagactgggtaaaagaaaaaggtttaatcgactcacagttccacatggctggagaggcctctcaatcatggtggaaggtgaatgaggagcaaagtcacatcctacatggtggcaggcaaaagagagcatgtgcaggggaacttctctttataaaatcatcagatctcatgagacttattcagcatcacgagaacagtatgggaaagacctgcccccatgatacaattacctcccaccaggcccctcccacgacatgtgggaattatgggagctatcattcaagatgacatttggatggagacacagccaaaccatatcaggagattagatgggccctttcagcacagtctgtcctagacaaagagacttaaggaagactcagggccccccttgggtgtggacattcacttgggagcagagtccggaagccagcatgatgcggggggaggatgctctagattgacggtgtttacccaaagtgcatgtgctgaaatcctaaacctcaaggtgatgctattaggaggctgggttgtgcaggggtgattaggtcccttataaaagaccctggagagatccctcaccccttctgccataggaggacacagcaagaaggcgccatctatgaaagagtaagaggccctcaccagaaaccaaatctgtttcagctacttgatcctggacttcccagcctccagaactgtaagaaataaacttatgttgtccacgtgccacgtggtgtatggcattctgcaatagcggcccgagccaactaagaaagtggggagccatggtgagtgagtgcccaggagccaggagtgtctgccccaggggctgcaggttcaggcactgctccacggggaggcctccactccttgccagttttggcagatccaggcttggggctacagagcagcctgccagactgccccggaccaggcaggagcacacctgccacatgagaactgagcaaggatgatgcagttgcagcccacatccaaagccctccttccaacacaccaagctgcaccccacagccattttgtggttcaaggtacaactcacattttcaggaacagagggcaaggcctggggatctactgccttactatagagagaaatctgcttccaatgccccacctgtagcccaaagccctcctaccaggacaccccaaaagttgtgtcatagctgtgctgcaggcctcagtgactcggctcaggatgaacacaggagggctggaacagaccatccctgctcctccctccttcccccactccccgccccatgagtagccctggccttctgccaagggtctggcagggcccaggaagggagggtgcccttcttttgttctgctaaagtcctggggtttctcccccatggtgtctgactgcccaacctccacgcgagcatttggaggcagggggcactttgacccactttgctcatcccagcctcctacaaatggcctcctggtcatcaagtgtggaggaaatcacacttggagcccaactgggagccccaaattcggctccagcttgctcttgacatggggcagggaaaagcaaggtggtatgaggtgcccaggcagggagacggggagcctcaggtctttctctcggccggcctccaaggaccgtcagacttctgagtctggtttctcatctctaacttgagatgcctgaactatacagacccctatcctaacactctgaatgaaacaatgtgtgatcccaagtccaaaaccttcaaggttgggatccttaaatgacactgagcaaacccactgaggagtttttccaggtgctggggttaccccgagggttcgcctggcatctccctctaccaggacgtgcagaatgactggatgtttgagtgggaagggcatgagagtgcatgtcatagggaaggaagctgtggcccagggtccccaggctgcctggctccccactaaaggctccctctgccttagcaattggcctcctgccgcctgtaggcttagcaccatctcagcgacagcgataacacctggagtgaacaggcctcctgcaaactttatgttgccctggagataacagaccgttcagacagactcaaacacttccagccaaggcagaggagtaggtccccagcaacagcaggactcatttgcttttagagataatgttgctgaggctgattgaactgtgctccagtctcttgtccaaacacgtgtatttctcatctcttaaccatgactgcatgtttggagataacacctactcaggagccttggcaactagatcagccagcaatctgtgggagaaaagtggactgccactaagtgtcaccagacagaatgccatcccttcagaacacagctgtctgctccaaaccctgtacctctcacaccagctggtgggggagcaggtgaagcagcacagcattgcaggaaagcaattttgcaaaaggtgtcagaggcttagaagcttgcatctcctgcttccccttcattttgttttgggtagctctcttacaggaatgactcaaaccagcctccactgacagaacaccaagaactcaggggaccctacaaagcttcctggacaggcttttcacctattcataaggaattttaaatttaaggaatataaaaagtacaaacaaaaatgttactacaatcccatgatcactggggtatttccctccaggggtgttgcttctgtgaatgtataagtgcatttccaaataatgaggtgcttactctgcggcttagcaactgattttaaaatatttaatagatagcaagcttttctcagtgctgttaaaaagtagcctgtcttgtcaagccttctctgattgctggacattctattgtttcttatctttcactacatgatacagcacacagaaaggcattttgtacagaaatcttacaatcaaatatagactcccctgtcagctctgagcttctccacatgccttttccttctgagtagtgctgcttccagttgccatgggcctggcccatagtaggtggtgttggataatgcttcccaaattaccctgcttcactgatgacaaacatagtggcttccctctcattgtgaagtgagtaaatgcatgtatctggcacagcataagaactgaagaaaatgccagctgttttttttttctttttttgagacagagtctctgtcccccaggctggagtgccgtgaagcaatcttggctgactgcagagggttcaagcaatcctggtgcctcagcctcccgagtgctgggactcgaggcacatgccaccacgcctggctaatttttgtatttttagcagaggcggggtttcaccatgttggccaggctgatctcaaactcctgacctcaagtgatccatctaccttggcctcccaaaatgctgggattacagacgtgagccaccacacccagctgaaaatgccagctttaataaagatgaagctaaggataaggaccatccccacgctcagagcagagcagggaagacaaagaaaaacaggtggttctaggtactggtcctctcggaggagggtacagcagcctgcttcttacctgaactgtgtttcttaaatatttctaaaaatactgccaggtgtctgcttacccctgtctgcagaaggaagtttgcatatttgcacaggaatataagcatttgttaattggtttctgtgttgatatatacaaatgttatagatccctgggtcaatagttctgcctggggaaaggtggaggaagtacaatcaggtgataaagtactgtgcccaagacgcagaacttgcttccaccggtgcccagagaattggcaggggaccatggtctgcctgactgcccctttccttctcactctccctcccttcctccctccctctttctctctctctccctctctttctctctttttattgagcttaatttgcaatatactgtcctgctttcttttcttttcttttttttttttgagatggaatctcactctgtcgcctaagctggagtgcagtggcatgatctcggctcactgcaacctcctccctccaaattcaagcatttctctgcctcagcttcccgagtagctgggattacagacgcccaccaccacgcctggctaattttttgtatttgtagtagagacggtgtttcaccatgttggccaggcaggtcttgaactcctgacctcatgatccaccctcctcggcctcccaaagtgctgggattacaggtgtgagccaccatgcccggcctgtcctgctttcttaaatagaggcagacaagccccattcccctaggccctaaagtctagtttccatgctttgtatggagagctatttttttcatgctgttgctggagccctctggagtcttgattggctgcatcgtggggaaggtgggctcgctggcctagcacctccctggtcccctgttggaggctagctcaccttcaagctccaatatctgttcttcatggtggaaaccaatttactgtcctctcagggggcattattctgggccaggcactgtgccagctgcccaggagataacaacctacaccctttgtttgccggggttacagccaggtgaaaagatggagactctcttgcatccttccagctctaagattccctaagtgcccaacaggaacaaggcaaagtgcaaaatccagggatgcagacacgaaacaagggagccaggaaaagttttcagagaaggtaaacttggaattggaaagcatgagattcggaaggcattgagctgggcacagtgtggcatatgtgaggacccaaaaataaggagtctgtggattcaagcatggggtgggagtgagggggtgctggaacaagcaggagaggaaggccagccagggggaagctgtgaatggccaggggccatgtgaaagcacggggaccccatcctgcagagggcaggaaccgctgagtgggagagtcaaggtcagatgtgagacgttgtccagagaaaggatcgctggacaaaaggcctggtggcagagatgtcattgagggaggttcttgacatagtccaagctaaaggaacaagtctgaatcagatgcccctaactaggcaattcagtggttcacaataggaataactgtgatggaaaatccagctggaatctgagaaggaccatattttgctttggacttgcacttgaggtatgtgtggaacatgccgtggaggcgtccagcctgcaggtagacggagactggagaaggtgtgagtctgggaacggggcacagttgcaattgcttatggagggtgttgggggcaggacacaaaagctacagcagaaccaggaaagcctggcatatgagggacagaggacctagctggagtcatgccatgggagctaagggaagaggagatttcagggaggtgatgtcaagaatgaagctgcaaagatcaagtattgcaaggacccaaatcgcatggcaagaccatgccacttgtgcttttttttttttttttttttgagacagagttttgctcttagtgcccaggctggagtgcaatggtgtgatctcggctcactgcaacctccgcctcctgggttcaagtgattctcctgcctcagcctcccaagtagctgggattacaggtgtccaccatcacactcagctaattttttatctttagtagagatgggcttttatgcagagcagtttcagcagtcacagaagtgaaaatgcctgtcagctgagaagcaaagagaaagtgagagtgtggtggccaggagtgtagaacactcttgtggggcttggctctgaggggaagaaggtccagaacaggggctggcaaagtcgtggggagtatttttcctaatgggggccttcgctgcagtttgtagctgcagtggcagagcctgtagaggaagagaggatgaagatgaccttgaggatgccatcctggaaggctggggaaccgtgatgtcattacttatgggataaactctccccagaggaggaatcctcacgtgctttgcatttgttccttcccccaggctcagacactttgacactccccagtcctgagtgtggggccagttcaggcaaggcaggagggaggaggaggcccagagccccgtggaaaattttcctagggaggcccaagcctgacactgggagacaggtcagcaacacaggacacagggctgcacccaggccagcacggggcccagagtggcaggctggcaacctgtgtccccctcaactcatctcacattttttctcaacagtttggacatttatggctttttatctagtaccatatgcccgtcgatgggagcaatgaggctgctggtctggcttttaatagcacagctcagatgtggacatggctaatactaacttagatgaggaaattaactggaagagccatggaatcaagcttggcctgtgtaggacagtcctcttaaaatgagattatgattttaacaaaaatcacgcagcacctgccatgtactggatattctactcggtcctgatgctggctttgctggcagatctctacttcattccatggagaggttggagggccttaaaattactctatttcccacaaagataaatcatagactcaaaaaataacagatgctggtaaggttgtagagaaaaaggaatgcttatacactgttgatgggagtgtaaattaattcaatcattgtggaaaacagtgaggtaattcccccaaagacctaaaaacggaactaccattcaacccagaaatcccactactgggtatatacgcaaaggaatataaatcgttctaccataaagacacatgcatgcacatgttcattgcatcactattcacaatagcaaagacatggaatcaacctaaatgcccatcaatggtagattggataaagaagatgtggtacatatacactatggaatactatgcagccataaaaaagaatgagatcatgtcctttacaggaacatgtcctttacaggaacatgatcttgttcttttttatggctgcatagtattccatagtgtaggctagagctggaggccattatccttagcaaattagcacaggaacagaaaacaaaataccacatgttctcacttataagtgggagctaaatgatgagagcccatgggcagaaagaggggaacgacagacactggggcctacttgagtatggagagtaggaggagggagaggatcagaaaaataactgttgggtactaggctcagtacctgagtgattaaataatctgtgcaacaaatccccatgacacaagtttacctatgtaacaaacctgcacatgtaccctgaaacctaaaataaaagattttaaaaaataaataaaaatgtttaagtaaaataaaaaataaattttaaaacttaaattaacttttaaaaaaaccatggactcttagaagagcacaaattcttgaaaatattctggttcaaacccttcatttgactactatggaatctgagactcaaagagagttagcgacttccagacctctctgtgtaggtggcagatccattgaactatcagaagacagctgccatcatccgacaaggcttctgtggggcccaggcacctctttcggacaagtgtggggcttggaccagagcccccatagcttctgggtggtggggggcaggcatgggtaatgcattgtagggggtgatctgggcggcgagaggaggactagaaggaggtggtaggcacagcaaacagaggcaactttcaacatccctcaaggtgcctgccttcctcagaactccgcctccctttagcaagctgaagagagtgagagcagcctccctttagcaagctgaagcaaaaggctttggaaatgatcttggggccgcaaactccttgagcaaacaagggaaaagtacttagcagcccatacacttcctgctagatcagagttcatcagggaaaatccacagagataatctcaggaacaagcgttctgacccttccagggcagcgcactgggacctagccgggctgatgtcagactccaggagagcgaccccggaccttgggcttatatgatcaaggaagcacagcccctggcctggtgggatcagagcttgatctgatcgtagtggggtatggcagaactctggccatcagcccttctcttccagctcaagggggaggcaggtggggttgcagggagcagcagccccactccagcatgatcaggagctggggttccagtctatgacacagcagcatcctaccagtgttgatcatcttcagattcagccaaaaccagcttccttggagctctgcaggagacgaactttgtgaggccagcctgccgagaatagggaaaccaggaatcggctgaagtttggcagtggcttacaaaactaaacacaccattgccatacaatccagcaaaagtactccttgatatttacccaaaggagttgaaagcttatgttcacataaaaacctgcacatggatgtttacagcagtagctttattcatcattgccaaaacttggaagcaaccaagatgtcctcgagtaggtgagtggataaataaattttggcacatccagacaatggaatatcactcagctctaaaaagaaatgagctgtcaagccatgaaaagaaatggaggaactttaaatgcttattattaagtgaaaaaagccaatatgaaagacaacatacagtattattccaactacatggctttccggaaaaggcaaaactacggggatggtaaaaagatcggtggttgccagggtttaacaggaaaggaggtgataaataggtaagacacggaggatttttagggccatgaaactattctgtgtgatactataatggtggttacgtgtcatgatgcatttgtccaaatccatagaatgtacaacaccaagagcaaaccccgaaccatggagtctggcatcaactgtaacaaacacaccactctagtggacagtgtagctaacggggaggctgtgcatgtttggggcccaggaaggatacgggaagtccttcttggccttccagaaactggactcctggcccatcttttcatctctttggagaaacaaacaacaaacaataatctcgtcataattaaaattcactgtgatataaagctactctaaaaatagtacaattaaaattaaaatttatttcatttcttgagctgacatttcagacagcccagtggcctcccactaaactcgaaggtaatgagtctctgctcagtctcacctcctgggcttctgttccagtgtgagtctgagctccattcaactcttcctgggccttttcagctctaggtgtaaaggttcagtgtgaactcgtagaaagaagacaggcttttcagtcaacagatctgaattcttataaggactgtctcatagtccttggtctcagtttccatatttgtacagtgaggatcatggtacagcgttagggctggacagaaagccctcagactggcttaggacagatggagtggtcatttgggttctttctactccatttcactgtgactataaagctgctctaaaaaatagtgagagtaaaacgaaaagattgatgttgattttcatactttaacccaatatatctaaaatattgctatttcaacatataatcaatatacaaaattattaatgagacacttcacattctttgtaggggctgtctttgaaattcaatgtgtaatttacacttggcacatctcaatttgtgccagttctatttcacgtgctcagaagtcacatgtggcccatggccaccacactggacagctatggtttcattgtccaaccccaccttggaacccaaatccttggaacccatgatcctcactgtacaaacatggaaactgagaccaaggactatgagacagtgcgtgtaagaattcagatctgttgactgaaaagcctgtcttctttctacgagttcacactgaacctttacacctagagctgaaaaggcccgggaagagttgaatggagctcagactcatgctggaacagaagcccgggaggtaagactgagcagagactcatcaccttcaagtttagtgggaggcccctggctgtctgaaatgtcagctcaagaaatgaaataaattttaattttaattgtactatttttagagtagctttatatcacagtgaattttaattatgacgagattattgtttgttgtttgtttctccaaagagatgaaaagatgggccaggagtccagtttctggaaggccaagaatcgaagtagtaagctgcagccgttttccagacaagcaggatgtggggatgcagaagaattcaggactggaggggcaaactccgtaagcaggggctgtcacgattcccatctccctctataaacctctctcttttcatgtcatactgttccatgttatatgtaactgttttaaagctacatactggacaaaaagtggaatagactccagcctctgaattgttaaataagctgatgacaaaccttcacattttctccatcaggatgtgactgaggccccactgccaaatggcagcatgctcagatagcacccaggaatttggggaaaaaaactggtgctcacagctgcccagttaaggcacaagtctcccgcctgctgcaggtatgtgggtgggacaagtgggtcagtccacagaacaaaaggtatgtaaaggaggccttctttttgggaaatcctttgtagatccaccacccacaccttagtcacaagcccagaaggggctgaaaatgacatttccaaggggcacaggctgccagccatcacaaagcacactatctggtgggggagatatggctatcgcagagttttcacccacgagctggagttctttgttctgaatgcatgccctgctttcagtatggtttccttggcagtcaaaaagatgctaatcaaatgccccattgatagctttatgaatgaaaggatgtgtattttaagagagctttttgccggcacccaattacactgataaacttttcgcagtctgacaggaattagtttcaaataagtggtgacatttaaacaacaacaaacctcaaggccatgattaagcagccacactctcaagcaccctcctgctccaccgatcattgtcaagtgcccttgcagatgcctgtttggctgcccaggctgggagtgctggctactgccggctaagcagacatcttgctctgctcctcggaccctttcccaatatctcctctggacctgggagccccattccggtctgtctgtatttgcaggggttgtgaggtgtatcagaaccttgaagagatactctgggaagaaaggccttcccagactgcctctccgcagtgctgtaagaatcagatttcttctatgggggacttccaggtctcttcagcattttctcagtcatcactgtatccctgccactcagtgaaccacagcaacaactcccagcttccagccgagaagcttgaccctgaagctggcctcgattctctacagaagtgaggccacagagcacaggtgaagggccacttacctggtatcatctctggtctcagctctggagaactagctcctctgccactgccacatcctgtccaccaagacctccttgctgaaccccacccccacccggtgcctcaggaccctaacttgtttgctgacctccatgtcctctcaccagatcaagccctggggagctgaacttcctctggcccactgccagctctggatcagtccacaccccagccagccacagcccagccctgcctctctctgtctctctctcatggctgggttggccttggccaatgctctctctagagatcaagacacaggcacctctcttggtctgttctggctgctgtgacaaaatgccttaagctgggtggcttataaaccacagaaatttatttctcactgttctggaggctgggaagtcctacagactggggtactggcctgcttgtttcctcatgagggctctcttcctgggttgcagatggacatctccctgatgtatcttcacatggcagagagagagagagagagagagagagacagaaagacagagaaagagagagagagagagagagagagagcatgctctttggtctcttctggtaagggcctaatcccgtcatgaagaatccccataacttcaactaaatctaatcacttctcaaaggctccatctccacataccatcccattgtgggttagggtttcaacataggaattctggaggcacacaaacgtgcagttcaaaacatgtggagacaagggggcaaggactagagagccctaccatcctcgttcaaacccttgaatcaagcctgaagtcaaagaacttcctttggagagccccattccatgagccgataagttccccattttgccatcacccacttgagtttgggattttcccccagttactgagtgcctgactgacatgatgccccccacagatgggcctccctgcccccaatctcacctcctctgttagtttcctggggttgccacaacaaagcgttacaggcagagcggctaaaatgacagaaacttatggtctcacagttctggaggctgcaagttcaaggtcaaggtgtcagcagggttggttccttcggaaggctgtgcaggagcctgttgggtgcctgtccctcagcttctagtggattacttccatcttcagcatgccttggcttgtagaaggactaccctgaactctgccttcatggtcacaacacatcctccctgtgtgtgtttctgtgtccaaatttccccttcttataaggacaccagtcttatacggacaatgctcaatgtatgaacctttgccaagggattggattagggacccactatattccagtatgacctcatcttaactaattatacctgcaatgacactgcttccaaagaaggccacatgatgaggtaccgttggttaggaattcaatatatgagtttggggggacacagttcagcccacaccacctcctctgaccctgaattggatgctgtttctgctctgcttatgatcctcttgtcctcactggcctcttggtccagcacccactgaggcaccagctctgagagagctcactggcttcacacaggtgcgacctgatggcgcctcacctcataccccaaacatccttctcatctctgcaggacctgctctgtttatgtccaggtatgttcagtgttcctgtgtgtccccagagtgtggggaggtaatgctccatgtacgaacctttgccaagggaatatggaaaccgatggatgagttcttacctcttttttcgtccagacaaactgtcctaagatggttttaagagataccgagtaatcagctgccagctcagtagcgcatcttcagattgactctccctccttccctgtctccttccccatattcttcatcttgttccctgggatctttctccctaataaaggaaaagctcatagacctctgccccagattctgctttctggggaatgcaggccaatccagccacactactctccctccatgtaacctgaccatgccatccccctgcttaaaagctttcagtgcttctccattgcccataaagctcatactttctagctatgagcttcaaggccacttggaggtcatctggccaactgtccttcctgctacaacagtctaagtcataggctttggaagataactgattgggtttcatctttggctcttattgaaaatgtggaaaaaattatttcacctctataagcttcagtttcttcatctatctgatctcaggattgagggaaggcaatgtatataaagcatctggcacagtggttggggcactaaatacatggcagccagtgtttattattacaaaccaggaaaccaggatgcaaagggagctgcttcagctccctttcagtcagcagacaacggctgtcaaacttgggaccaaacagctacaaaaccagatgcccgctctccacaaataagaggctgaagtgcagctctccactgatgaactataacagttggaaattcacttgtactatggatatttcttctgcacctctcgtgaacagcctgttcttgctgagagctggacagtaaataaaacatctacagtgcctacttccatggggttcatgttctaatgagggagtggagaccctcaacaaagaaccagccaatgtgctaagtcctgtggcagaaactgggcagaaaagggaagagagagggaggatggttatatttttacaggatggttaaaaaattagtcttctgttttttgagacaggctttcactctgttgcccaggctggtgtgcaacggtgtgatcatggctcactgcagccttgaccttctgtgcttagtcaatcctcccacctcagcctcccaagtagctcagaatacaggcttgtgccaccatgcccagctgatttttgtaatttttgtagagagagatggggtttcactatgttgtctagactggtctcaaattcctgggctcaagtgatctgcctgctttggcctcccgaagtgctgggattacaggcacaaaccaccatgcccagccaggaaattaatcttctaataaaggttcacttaaggtgaagggagcaagggagaaagttgatatcaaggggtggcattccaagcagcaagagtaggaagtagaaaggcctgaggcgggagaggtcttagcctgttcaaaagatagcagagaagcaagcactgctgaagaggagtgggtgaggggaagggtagtgggaagtgaggccagagaggggtggatgatctgcagacacaggtggagactgtgactgtgaaatttgccctgagtatgatggaaagccactggagggttgaacaaagttgtagaggcacctgactagtttcagtggatcactctggctgaatgaggccagaaaggaggcctctgccatgatctcagtagggaggacagtggcttgaacctgaaggcagagcctggaggcagtgagaagtggtcattctgagaacattttgaaggcacagcttacagaactcaccgatagattggatgagggttgtgaataggaggtgatcccaaagactgtggcccaagcaaatgaaaagcaggacttgcccttttctgaaaaggaggacactgaggaaggaggtagcagggacaaatctggagtttgcttttgaatgtgccaagcttgagatgctgactggtgtctaggaaacacaaagcatgcctggacacccaaatgtggaggtcagggagaagttcagactggagatacactggggaacattagagtatttgtggcatttagcaccagaaaactgggtgagctcaccaggggaatgagaggacctccagggctccttggggatgctccagtgtcccaaaatcagggcaacaagagtccaagaaaagagatggggaagaagagcccaatgaggcagggagaaccatgaccattatgccctgaaaaagccacatgcaggagtctcaaggagaagggagtgaccaactgcccaatacagctgacgaccatatcagacaagactgagaactggccacaggatttggcaacatggcaagagctatatgaatggactggtgagcacataagaggagaggaagtggaagcttcaggattagacagggggccaggcacagtatcccatgccaatcccagcactttgggaggccgagacagaaggatcacttgaggccaggagttcaagaccagcctgggcaacagagagagacctcatctctacaaaaaaggaaaaaaaaaaggaaaaccagcctggacaacatagggagacccagtctctatcaaaaaaagaaaaaaaaaagacttaattttttaattagctggacatggtggtatgcacctgtggtgctagctattcaagaggctgaggtgagatgatcacttgagcccaggagttcgagttgcagtgagctatgttcatgccactgcattccagcctgggtgacagagcaagaccctgtctctaaaagaacaaaaaaaaaaaaaagagagagagagaaagaggctagacaagtctctggaggagttttgtgcaaaaaggagcagagaacactgatggtgtgagagtgatgttcttcaggagatgacagtgaatgggatctggggacaatggaggtctttggggctgttagcttgtttgttcttctctggccattccagcactcagggtcaccttcccctccaggcccctccactccagtgactcctttggtgacttatccactcatgcattctgagtctttcctgtatcacctcctgacccctccagtggctcagtcactatctagctgtgtgaccttggatgagtcacttaacctcacaagaagcagcaatcagtgagtccggtgacttcagtttcttccagtatcagggtggacagagagtcacagtggtaggacctgggggtgtttctctaaggtatgtggaaatttaggctcccctttgatctcagattcatggagaacccagaactggttattagaaaactcttgcggagtgaataggtaagcttctttcatattaattcttcacttggcaaatgcttaagtgcctgctctatccaagggtgtgtcagaggttttgcaagggtggaggatgagcctcttggattttaccctcaaagagctcataaccttgtggggtggtgggtgtgtctattcaaaaccataacagggcagactctctggcacatcattttgtgttcatctttaggaccagttgtcacagttgcacacacaaattaaagttccacaggaggtgggatgttttcggtcttgtactctatgtgcctgacacatcgtaagcagtcagtacatgtttgttgaatgaaagcagtattgaatggtaccatttaatttgtgttttgaagcaagggtgggatttggacctacacagatgggcgagggggcgcattgcagactggcgggggttggggtggctggaggcaggaggagggaatggcgggagcagatgtacagagacagtgacacccaaggcatggttggtaattgcaggccgactgtgactggatcgtgtgatatgtcaggatgcaaagagactgaaaaagtaagttggggccagatggtggagagggttgaattcaagctatgttaaagggatcagatttatctatagtaggatgatctcatgttcccatttcccagggtagttttgcctgttgtcccagggtgattattcatggtggcccctttcatgctcaagtatccctgtttggataagttatgtggtcctgcaaccctaaaggctttgtggaacccccaaaggtttcacagagggacagggtcaggctagccttgaatggtcagtgcccacagtgtttgctggacctggaggcaggagctgggacaccctccagtctgggcgatacaggtcaaagtcttttggttaatggtaaatcaccaacagtggccagggtacggtgaaatgggcactcttcagggagtgccctgaaattgttccagaccttttttggaaatcaactttgcagcacacgtcaagagccttgaaaactgtccatgccctttgttaattccacttctggaaatctctcctaaggaaataattccaaatatagaaaaggttctttgcatagacgttcatcataaaactctatgcaacaggtctagagacagctcagaatgccacaacagatgatattaaggacataggatatatctatcaatggactctaagttccatagaacagggacaatgtctgattacaaccactgtatccccacagctaacatagtgtctgacatatttaatgaataaacaagtgaataaaaatttatatcaggttaaacaaaaaagatataaaacaatccttaaatatgatatataagttcccatgtggacacactatgctctcaaccatttttttaaaaaacagacatatgtatatgactatgcatatgaaaacttttaaaatgactccccaaaatgtaaacagtgattatgtctgagtggtggaactcctgataatttccttttttcaattttatttttgtatatattgtatatctttcagaatgaatatgattacttttataatggaaaaaaaaaggccacatcaatactttaaaaaagaaaggctagcattaggcagggttttagcactcacagccaggacgtgataaagttttgcatcttccaagggttcccagtcagtctttgtggtatgagtctccaattccagccatgatcctcctctgtaaggtgggtacctctcacaatgggtggcagagggtccacttgctggctagagatgccctcccaccccccccaccacccccaggagctagagatactgaggggtactggctttcactgggacagttcgtacacttgtaagcggccatcaaaaatgatatctaggctgggcacggtggctcatgcctgtaatcccagcactttggaagtcagagcagagcggatcacctgaggtcaggagttcgagaccagcctggccaacatagtgaaaccccatctctactaaaaatacaaaaaaaaaaaaaaaatagctgggtgtggtggcaagcacctgtaatcccagttacacaggaggctgaggcaggagaattgcttgaatccaggaggcagaagctgcagtgagccaagatcgtgccattgcactccagcctgggcagcatgagtgaaactccttctcaaaaaaaaaaaaaaaaaaaagatatccagcaagatgaaaaactgttgatgatacagttttaagtgaaatagagcagaatacaaaaagccatgttcactaagaacatatctatgcaaactatgcacatggcaaatatttatcaaaagaatgaaaaagcctcacaaaaaatatgaccacatgcagccagagatgagacagacaaccaaaactgaatgcaccttttcagcaataacaattttagagacgttcccagaactaggatgggtgtctacaggtgcttacccagtgtctctaggctccagggcaacctgtttcttagagcagagcttctcaaactttaatgtgcacacaattaacctgggatcctgataaaacatggatttggattcaatcgagctgggctggcaacaaggactgaatatctacaaactccaggtgatgctggggcacagaacacactcaacgaggcttctacccactaccccaattcttagcaccaaacactttccccagaggcctagcctggccctccgtcctcaagcatgtctgcacctgaaatcatctttgtccccagcatcttggcaccatcgagactaataatgagaagcaactccaggcacttgcgtgggatccaggggggcctgaggcccccaattccttgggaagcttgaacaatgacatctttctggggtgatgggaagacaaaagtgactccatcttggatgctaatttgcccatgttgacttctgattagccccagtcccatgaatgcctcctgactcctactttatttactgtcccgagtgtaagaatatgtactcctgcttttagatcaaagcaagcttgatgttatcatgcaaattctgggctatgatgcacatggcgttcttgcctgctctggcacactacctttcactgtcttgctggagcatgtatatccttttcccttggtatataagccttgggtccgagagtaacagtgcagagatctgcctgtcttgtggccacccgagaccacccgcctgcttaaaagttccctcaataaatcactcaataccaacaaactggatttgtctgcttccttctttggtctcttggctcctttggcatttgggggttgctttgtgcatgtgggcttttcacaaaatagatgggtcccggagcctgggcttcgctggcaggtggtcacctggagcagccagcagcagatggcaccacaggacaagcacaagctgtgtccaagagagtggctcaagaaatctgcccaaaatccaacacaaaaatgaacaaaggaactgaatgggagatgtgaccaaaagaagcgataagacaaacagctccaggaagggagctgctggctcaaagagcacttgtcttgggcgtcagttccaccggttcttggtcaggggtgagagccctatgccagaccccctttgcagaacctatgctggcttatgatgaggctcttccagggctccagcacatgaacaccctgccctgggaggctatagtaggccagccactgtccactctgctggagggtcagtctgagccaacagaaccatgcggagacatcccatccaatgcagcccaggagcagtcttgacatttctttccctgcaaggacaggctgtctggtccacacatagatgaagccttgggcctggttcagcatccagaggactaggccataacccccaaggtaagatattcacactcattggagccctttctcctttttccctggatggctggaggaaggggacccctgcttttttcagccagtgccccatgaagttagactcccaggactccctgcccctgatcctacttaaggccactgggatgcccaataccctgaggaagctttgaaagatacgtggcacattatctggggcaagtcagctcagtggtcagagcacagagtgaaggaggctgcagccatagccttgagttctggaggcctctgtagtgggtcaacagtggggagagccacagagtctcggtccagctactgtatcaaatgaggtcctgggaggcaaggaagggcaggcaggagactatggctgcaggagcctgagccctggcccccttcccatgctggactcctgtccagcaccaaacattcagcagtgagtggcacctttaccatcaacccaccatggaaaacttccctggagctctctccttgtgccagggcctgcccatggcatgtaagacacaagccccatgatggtatggatttcacctgcaaggcgcttgccatctcatcgaggagaggaacttgcaggctgatttccatgtaaggtggaagacacagtgatagagaaaagggatggagtaggaaatgagtcctggaattcctgcttcagagggctgtaagccaagactactgcatctattgtcttcagctggatgcgctaatgatctaacagtaatcccactgctttgcatccacagaattctttacttctgaagcacctccacacaccatctctcacagaggtgaagagttgaccaaggtctagagctctgactccaagcgctccttccctcaccccacagtggccccgtggtctcactggtggaggtgaaatccctgggttcccaggccaggcatctgttgctgtgtcaccagaatgaaccctgcctgctgccagcagacatctccggctctggcatctttcagctcaagctgcaaggcttactgtgacctctggaatctgtgctcagaattctcccaggaacaaacagctgaagtatcaaaatgccagtcttcacgatgcaaatggatgcaaaaacagctcttgccagcctatctggaccccagaaagccaggaatgctggggtgccaccccagcttgcagtgtgcccacttagctaagtggaagagcctggcaagggacatggcagggagaagacctagacctggttaaatgggattggacctgccacttagcctcagggaccctttggagacttccgtatgtactgtggacaggggcagatgctctgactcctccaggggggcgctctgctggcaagtcagcaccagggccttgatctccttcttgaagttggtgttgagaaagccatagatgaatgggttgacacaggtggaggccatggcaagcaagtggcacactaagaagatgaggttcccatggcagatggggatggcctcatggtgccagtcttccaggctgttgaacacatgcagaggcagccagagcacggcaaaggccaccaccatcaccaccagcaccacattgacctgcttcatgtgcccagctcgcaagctgtaggtgcccttgtgaaacacgcgcccctgcctctgcaggcgccggtagatgcgtgcataacagaccaagatgaagcccagtgggaggcagtactggaagaggagcaggaaggtggtgtagatggtgcggtggtgagccagtggccaggactcggtacagaccaccttatccgccaggaactccagagccttggagtggttcttgtggaagacattctccaggatgctgttggccaggaagggcagggagaggacacaggcaatgacccagatgagcacaatccccaggtaggcctgtgagatgctgggcttccagcctgttgggttgatgatgagctgatgcctctccagggccacgaggacgagcgagaggatggagaccgtcaccgacatgcactggatgaaggccgacatcttgcagagggtctctccaaagatccagtagtccatgatggtgtagacggcggtcagcggctggcagaggaggcacatgaggaagtcagagaaggccaggttggcgataagcaggttggtcacgttggctttctccttctgcctcacagttacacacatcaggcagaggttacccaggacccccacgacagtctcaatgctgtaggaagtgacaatgaagaccatcacgtccacggaatcctggcaatgttcagagaagttgtatggggtgcccaggggtttgcttctgttttcaccttgtggagattttgggagcagcaaggccaggaggtgagaggtgttcatagtggatgtgaaaagattccaggactcttgaactaagtgatacacttgagggatgacgcctacaaggcaaacagacaaacaatactcagggatcatgcccagggtagaatccagagaggagcagggccgggtagaaaggctctcagctgcttccaacccaaggctggtatctggaggggctattacctaaggctcatggtgagacattggcatccaatgattgctaccttgttagaagcacttgttgcatgctgggtactgtgctcagcactttcgtctattagctagtttattcctagaggtagatattatcaatccgtttcatagatgaggaatctaagaccctgagatggaaagcaacttgcccatagtcacacagctaattagtaacagggcccagttacaaactcaggtcatctaatgccagaacttgttctactaattccctccggcctcaggatgaggctgttctgatgataaagaagttggagtgctgtatgcagactttagtgacggaattgttcagggaacatgggtagaatgccccttgtcacattttatctgaatggagacagcaataaatgccactctgcacaggattgcttgtgtccttccacggcaccccattcccttcaagatagagctaaagcctcggggatccacaatcagtgcaccctcctggtctcagcccctccctgccctggtagccttgttttttaggtgatacctggcaaaactgaagactgcccagtatgcaaagcctggctcatcagcacaccagcttcttcctactacccaccatgtgcacagacatacctggccaaagtcacaggtgcccagtgccctccacagaacctactccatgactatgttcaagtcacttgatgcagtgtgcagctcacaagcacaccagactcttccacatctctatgccctggtacaggctgtcccttctccgaggacctcctcagcacaacggaccccctgccaagactgagttggaatttagactccagagttcccccgtgttagtgccaatgatggatgttttgcatgggaagcaccataccactacatacatcattgtgactcacctctcagattctctagtcattattaatcccacagggttgcagttctcaaccttcagtaaacatcagaatcattctagaagcatgttgaaagtgcacatcccagggcccttccaccaggagatgtagttaagtgaatccaggatgggggccaggaatctgtatttaacaagtagactatgtgattctgatgcacatggcccttggaccccatcttgtaaaacactgtagcagaaaaccctattcgagatattctttaagtctcatatcatggccatatgtattttttacatgatcaattgctatgttaaggcagtttttgcagagcacaaggccaaaatcaaccagagctcagtaaaatctatttgtcggctgtcatgaatgtcacttgctgtgcatctgatctacttataaagatgagtttctaaggtcaggacttcaacacctgcctggccaacatggtgaaaccccgtctctgctgaaaatacaaaaattagccaagtgtggtggtgcatgcctgtagtcccagctacatgggagggtgaagcaggagaatcacttgaacctgggaggcggaggttgcagtcagcagagagtgcaccactgcactccagcctgggcaacagagcgagactctgtctcaaaaaaaaaaaaaaaaagagtctcatttggtcatttaaaagatcaagctgtgaattcacctgatagtttacagtctggttatttaggaaccagatctcgaaggcaggaagatttctccagcactatggtcttcgggcaaaaagggccatttggggctgaacatggcaaaataaactattccagagccaaacacagggcccaatataagataaagaacagtcgcagctgcatgaacctgtggcagaggcactgcactcagaagcagcaaatgggccagaacccaaggctctgggtgaccatcagcaaggcttggccagtggtgtggagaaacaccattcatcccaaaccaaccacctaaagcaggatcagagtggaaggactgggctgggagggctccagaaaatgctcactgcttcattcacccactcaataagtgtgtgtcaagccctgggctagaaacaagggctgcaaagatgacttatacagtcatggccctcccagagcagaggggctgaccagcacgaatgcagatggaactcattgccattgccaacaccaatatgaaagagaggcctgtgagttgagagatcagagaaggagcagggagcagggaggtgagagaagaggtggcaatggtacagggctcaaaggctgaagaggagtcaaccagccaaagggacagggagaggagggaactcgaagtgcaaggaacagcatgtgcaaaggcacagaggcaggaaggagcagagcctgctgggaaaagtaagcagaataagaggttccagggtggcagatgatgaagctggagtggtgggccagaccagcaaggtcaggtccattccagtaagatcacttggatatagaaaatggattggcagagagggccaagacaggaggaggaggagcactgaaaaggtggtgttgggcatctgcctggggctgctgggcttggggtacactgaccagtgaggaccaggggacctcaagtccctcaggcacacccaagggggtggcgagtgtatgagggggagggtagattattacgcaaggtcaataaaatggtgtctctgcattttgtccccaggcagctctccagatacaaaaactagaaccagctgcaagccccaacagggaccccctgcagcctgccttcccagtcaatcagaggaaaattaatgaatcatacacacaatgctaatctcccagtggggttagaatagggaaggccctttgctttgtctcctgaaatctcagcaaaagctactatatcctaatgcccatagcgcccagacacctcagatgcaccccttacctccttggcttgcggcttacagggtgcggatggggccgcccatgtctcaggtgaggagactgaggtccacagtgggggtaggatgctccccagatccagtgtgacgctctgcgccccgggccaagggcaggcagcgcgcccggcttcccggagggttcgtaccggggcccactcggccccgcccccggccgcactcctgtgcccagggggcaccaggcgcggggcagagccgcgcctgcttcacctgctcctgctgccccgatgctgcctgcgtgcagagtggagcggctgctacgctcccgcctgcgcccgcccagcctgccccttgcgcccgcccacgagagggctccagccgcccgcctgccccgggaccccagcactcgccctggggagccgcatcttgagcccccaaggcctgcccggaactgcagccctgcctgcgtgtgtctctcacgcccacctcaaccctggatacaggcaggctggagctgcgctgtctttctctctctctttctttctttctttctttctttctttctttctttctttctttctttctctctctctctctctctctctctctctccctccctccccctccctctctccctccctttctctttctccaggagtgtttctctctgtctaggggtgtgtgcgtctgcctgtctctctctctctctgcctcagtttcctcatccatgaaatgggtataaaaagacctgcctttcataagttcgtccagaaacattacttgcagacctcctatgagcctggctctcctgctgggcaccagagctggacaagacaggctccctgtccttggttccttctggagctctcagccctgggggagaagacagacagggtacaaggaaagagggaaataaattattacagggggtgagatgctgtgagcaaatgggttcgataggccagatggatggcacagccacggcaaaagccctgaggctgggagcattcagcccctggagaccaggggagggcagtgtggctgagaatgtcagccagggtgagggaaggagatgggcatccagggtgtgagtgaaaactcagggtgggccctggaagtggagtgtcttatctcaggcagtcccaaggttgtggcgatgagaattcaatgagaatggtcactttctcctttggagctgagatgcacatgacttggctataatggaacagctttgcttacaagggctgctcctgttttgaatacactagcttataattccctgccccccatccccacatggcaaagtcacatatgcgcttagagaacctcctgagagtaacagatctgcttcaagagcacctcctaaacactggacatacacacctgtccagtgaacctcctgtggctccccatggaaatgtccccatgaagtcatggcagtggtccctctagaatggcagctgccgtttgtagtgcagagactctgcagacactaccttagttaatcatcacaacagctctgagaggtgggcatttttattcccatcgtgctgatgaagcaaagtgacactcagtggttgagcaacttgcccaaagtcactcagctaagaaacagccagatccaggatgcgaacccacctgccaagcccccaggcctctgctcaccatcgctgtagactggcacctgtcatctcttctttctggaccatgctccttcctgtcttgactacctggaaagcggctgctcctccgttgcaccccagctccgatgtccctgctgccatgacaaattcctaccaccctcccatgctctgctgcagaggcagatgtagcagcctagttggttgtctgcctgagcagctttgtctccccactcccctatgtctaggtcacagctcttgtctccgcctccagatcccagcacaagtccacacacagcatctgacaaagaaagaaaggaagaaaggaagacggagggagggaggacatttaagaagacctgattgtaacggtagcttccagacatgtaaaatcagagaacattgcttgaccagaaactgctcaactccagctgggagctctatggacacccgtcctctgtgcaggcaagaacgcagccactgtcacctccttcttgcagggcagctgtgtggggtctggatttgctggtaagcccttggaggcaagcttccacatagacacatttgagaactactgcgcaaggcacgcagcctgaaccctagctcttgtgggtcagagaacagcagaagagctgaaatggtggtaaaagcagcaaacagctcccttgccaggcagaagcatgtgaacctgcccttagtccatcctcatgcctaactggtgtggtatgatcatcccatctcacaggcgagaaaactgagcctcaaagaagtagagtgtcttgtctcagccagccaacttgtagatggtagggctggactttcaatccaaagtccaagctcttccttcaggaccataatgcccaggagaggggtaggtagctcttcctagcagacatttcaggttaaaccaatactcccagagttggctgccagaccctttgcctctgctagggaaaggagacagcaccctctggaggcagcagagccctgcaccaatcatagccagagcacttgaagttcctcaagaaagcagtctgtaagaaagaactgggagctgctgttcttcccccttgctggagtccagggtccggagcacagcctgagaggctctgccagtcagccaggctgcattctgccatctctggggaaggggctaggtaggattttccttctgccataaaagtggctggctggtgtgacctgctggagactgcttctcctaaatagcttagtgacaggttcccttcccaccccatcaggaatgttcctcatgaatcacccggaagtcagacaggcgcacaactccctcaggtgtgtgcagcgctccacattacctctctgaacctcagtccactgcatgctcagtattccccctggtcctatgaggaagctgaagatcagctagtcaggggatggatagaccccaggcaccctccttactgtaaatttgctgggatttggaatcaggcccattcacagttgcttacaccacattgagagtcagtgtggtgactggtcacaagccgggcacagaagccgtctcgcattgccccagattctcatctgcaaagcggagctaataacaaagtttgcctcgggagatgttgtggcaagaaatgagttgagatgagaatggctctccacacagttatgggcaagaaacaccctgcagagctgtggctataagcattcctgtgtcctgcatgcttgcccacctccctgagcctctgccccagagctaatgggctgtcccgaccaattctagctggaaacctctccaaaccctcatcacgacccacacatctcacctggacagtcctaagaggccctgcaagctcagccatggtgagcacctcctagacactggacagacatacacaactctccagtgaaacctcctgtggctccccttggaaatgtccccatggagtcatggcagtggtccctctaggatgggtccctctgaaatcagtctgactctcttcctctttcaggccttctagtgctgcctcccccagactcattctgcatgtaaactctccattttcagggagtatggttgagtttctcagatccaggcttgtgtagatgttgcttccacggcctgaactcatcaagctctccattctcagagacccatcccacacacacagctccctgagaaatgtccttggccatccctgcccgcaacctgtgcattctgaagggcagctgccaagcatggtccactcacatatagctagctcccggaagctgtcctacttttttcatggaaggctatagcagagggaagccacatcagctatccggggaaaccagtttattttccagtacttataacagagaaccaaagatcctcacacatttaggaaatcaacagcacaaaggagataggtcaagatgaataaacaaaataactgaccccaaaagaagctgaaataacttagggaatagaaaataactttaagagaccaaaacttcctttaatgcctaaattagagaaattactgaatccatataacaagagcagattgccatgaaataagacagactaagaaagcaagaaagaatccttgaaaactaagcatgactactgaaatttgaaaacacatcattagaagggatgggagaaccagcttaggaaatatcccataatgtagagcaaaaacacagaaagatggaaaacttcagagctaaaataagagacatggatgattaacactaatgacccatcatccaattactaaaatttccaggaaggaaaaatcaagacaatgaaaggcagcatatcagtcatagtctgcacaggacacataattcacccccagattgtcaaacaaagggattttaataaaaaggtaacttacagaggtgtgggaagcattaaaggaaagaaacaagaaatggtgaggcacccagagactggcagaagacagaagcaatcaccaccctacagttaaaagaacaaaaggagaaaaccacattaccacagccagaggactgcagaggaagggcccccagtgggagcttctgtagtgtggaggcatgccaccgcctccagacagcatggaagcaaggggaagtagaaaagaattctaccaacctctctctccttccacttccagtctcctgtcagtccctcccattgaccaaacccaactggagccctgccagcaaaggagccatcagcttcccctggcacagggaagagcagagaaccacagtagagaatgcatctgggtggggtgtgagcaaaatagtcgacacatagaatcatcaatagcaagagtattccagagctacagattaaaaggaagcccgaggaactgctccacacctagacaggtactgcaaaatttcaaaacaccaaaaaaaaaaaaaaaaaaaaaaaaaaagaagattctaaaatgttccatgggtgggagcaggaagagaaaggttgcctacaaaggaaaggagagacagagaccattctcagtcttgtcaacaacataggatgatggaagactctgaaaagatggagctatatttttaggactcctggaaatatattttgaacctaaaacgctcatctcagcgataatatcaagtgtaaaggtagaataaggatatttctaaacttgcaagcttacatttcctgaatcctttctgagagagttcattaaggaagtgtattagtccattttcacactgctataaagaactacctaagactgggtgatttataaacaaaacagctttaattgactcgcagttccacatggctggggaggcctcagaaaacttacaaccatggcagagggggaagcaaggtacatcttacatggcggcaggagagaggctagggactcccaaacacttttaaaccatcagatctcgtggaaacttaccatcatgagaacagcatgaggtaaactgcccccataatccgattacctcccaccaggtacctccctcggcatgtggagatgacaattagagatgagatttgggtggggacacagagccaaaccatattagaaggtactccagcacaactggtataaaatcaagcaaggagagatgaggtcaaagaaatggttgaacaggcccaggagcctgggattttctttccctacgcaaatagtaaacctgcattactgtatttctaggggaattacagggatcgatgccatgattaaagacatgaaagatgcagggacagggaggcctgtcacatttctgcccacttggctcacctctttagctctttagcctgtgcaggaagttgctgaatcttggagaatgactgtatgtcgtcgtaaatttaatcaggcagtaactccaattttagctgcttttctaaatgcaacatagaacaacttaaccactctcagcacttagtatgtagctattgactcagcttgtgttttctccccatctgtatcggtaagaaccagcagaagtttgctttcacctggcaaggatagaagtacaaagtcagtgtcttctcccagatcatgttcgttttccagctttctgttatagtgtggtctacagagaccttgatcttctgaacatcccacagatccacagatggtatgctggtgcactacactggtagcacatgctgattgaactgatgagcagggagaataaaccagatgccttcataagatgcatgcagcacatgggcatgggtgggacagtagccatcatagcccgggtagtctaagctaagcacacgggatatgtaccagatggcacccatctggcgtgggggagcctggcatggcatgtcagagccagaataggacaaagagtggccatgcagggaggcaggggcacggtggcctagcacagggtgttagagtccaagtactgtcaaatgaaagtccacatggcagaaggggacaaccaagtgtggatgccagagccacacagaatgagtggaggggcagagttctgctatggaagattgggtatatgcagggggaccaactgagcaaagttgggagccagttttctcactcatggagaaggcagtcatgaatatggaaggagggaaacccagaataagccctgtggttttgattagaattgaaagtattgaagtgagctcatggttttctatatagagagataaatattgatctaatagtgtgtgtgcatatatatccttgctctgtccactgagagagtctaggagcagtgataccccaatagcaatgaacactcctagcacccatatattgacttctaaatgccattctccattaaaagaatccaagtctccttcggaaaatggctgattccagggcaagggctgggaaagcccaagataaacctgaaagatcttgggagctagaaagtaatgaagtactctaagaatgaagggtgcaggccagaaaagcccagaacctggcttgaaggggcccttgatggccaaatcttcgaccatgtgagcatcaaagtaaataataatgatgatggataataacctactgaataaaataaaaatctgagtccatttcaatataactaaatgatggagtaaagtgacagtttgatgaggaatggaatatattcatggtttcagtgtgcctcatcacaaaatatttgtttattacaaagagaagagtcaccttacagtggagaaggctggcagtcacctctgtaatcaaatgatcatagcgaacaccatctctaatcctagagtgaaattactcaccgcatgacaggatgcaaggaaaacgtagcacagcttctgtgatcttcctgctgaaggtgcatgcaagtgaatccaaccctgaagaagcatcagcctcaacccaggtgagggacatactacagaataactggcctgtcatctggaaacataaggccatggaagtcaaggaaagaagggagaaccattccagattgaaggagaccagagacaggagaatgaaacctgtgtatcttgggacagctgatgaaactttagtggagcctgcagatgaggcggtagcaaggtgttcatgcaaattgccgggatcatgctctcaaatggcatagaaaaattaatgttctttatcctcactttcaacttttctataagtttaagatgatttaaattatatttttaaaggtgtcaaaaattttcttcatctttatagaatgaaacagaaataaaaattgaaagtggtaacctctggaaatagaactgggggaaagaaggaaagaatatcaacgggagttatctgacccataggattttaggtcattttttgctttgtttccttttctaaatttctctctattaaaaaagaatgaatgattacaactttataaaggaaagaatccataaaatatatgtaattaaatcccatggtacaaagggcaaagaagcttggcaacaacgcttccagcctcagttttgtcatatgtaaaatggagcaaagatgggttcaggctcattacaaactggtgagggttcaaataattaagggatagggatagaatatcaaagtattttcaaagccacatagaagggaggtgtgagggagggttcctaggacttcaaagtcggaagccgataagggcctggccttccgagaagccttctaagtagagattctggccagcagggctgctgaagtgggcacacctgctgtaggaggcgtctccttgggccctgagggatcacctgttctttgtttgcctttgcttctctgctgaggccataaagaggctgggctgtaaaataacctactctggccccaggaaagagataagagatgtcaactgggcagccaacaccttccctgcctcccaccccaaacagctggccctgccctccccacccccacctcttcttctctccagagtaaagctggacttccctactgcctcctgcctgtcccttctcaccaatgctgccaccctttttctccactctatttcaaggaagtagccatctgccactaaaactttatcccatggtccaatccatgagcttgaatccaaccagcccagagcagcattttcccccttgatagagaataagagaaagacaaagacaaaggcacattatttccctaaagtcctatattccctgtcttctgtgaaccagtgaaattatcaacccacagtgggtcagctgcccttctgtggagcacatcagaggaaaaataccaacgcagccctggctgcacactttgtgtcgactctcccaatccttctccctgccttctggaactacagagattcattcagtctactgtcattcaactaatattttaaagcagttcagtagactgaatgttacatggacaatagactcagtgttacagagacactggatgtacagtttcgcttccaaagacatgttataaaaaagggcacaaatgggataataagtaaaataggcaccagattaccatatgctttgaacagagaatttaccctattctattccccatctcaaattgtgcttagctatgttgtcctaccaaaattccctgatatggtgatatattagttagctaaagctgagtaaaaaagagccacagaatcttagtgacatacaattgacatgactgcaggtcagctggggctagctgacctaggcgagctcaatggggcagctctgtttcaagctatgagtccaactgaacttggctcctcactgagatttaaacttctccactgatattccatctggggctcaggctgaaggagttcaaagaagtgttatgcatggagatggcagcagttcaagaggacaagcccagctatgcaaggtaatttccattcctccgtgagtcacatctgctaacatccattgaccaaagcaagctacatggctgagcacagttgagaggcaaagaactgtcccccacctaccctgaggccaaagcaagtcagagccatgcccaacattaatagaaccagtaactacactcttccagtgaaatggagaggtggaagagtgaatatgtttgaacagtagtctcatctatcatagtcaatgatacaatttcagaaatattaaggaaaccagtatttgtatctatctcattgaatataataatgaaaaatttctcatcttacattaccaagtccaactcacttttttccacagataattttaaatcttcccccaaaagaagccccattccattttctcatggaaataataaactcaaaatttcccatcccctagagcagtttcactctgaaacagatacagtttccctacacttccagactgggctatagaaagttctacaaggacacacaaacatagacaaaaaagaatattgcaatattagtcgtgtgtgtgtgtgtgtgtgtgtgtacatacatcacatgagaaaattcccagatccaaatgaggtataatagcagcttataattagagtaactattccattatacaaaaaaattatctcccaaaaggtactgttaaatcaagtttagccggccgggtgcggtggctcacacctctaatcccagcactttgggaggctaaggcaggtggattacctgaggccaggagtttgaaaccagcttggccaacatggtgaaaccccatctctactaaaaatacaaaaaatagccaggaatggtggcacacacctgtagtcccacctacttgggaggctgaggcaggagaatcgcttaaacccaggagatggaggttgtgatgagccgagatcacgccactgcactccagcctgagtgacagagtgagactccgtcttaaaaatataataaaaaataaatcaatttagcctaaatctgcctccttacatattttaagttcagcctaaaggtttttctgtacatcatgaactataacaagtggaggtgtaaacagactgtagtctacacttgtgctaatcaatgagttttggccaatcaaatgtagccaactgtttgaaccctgttcaaataaggtgaacaccaagctgtaaccaatcagctatttctgtacctcacctccgttttctgtacctcactttcctttctctgtccataaatcttcctccatcacgtggctgtgctggagtctctgagcctactctggctcagaaggctgcccaattcgcgaatcattcattgcctgctcacttaagctcctttaaatttaattcagctgaagtttttcttttatcagatggtgtcagagcagatctgaagtagagcttctaacgactcccaggagtgctgagtgaccgaagccaggtacctgcaggacctatttgtgttcgttgatctctcagagcagttggaagtcatggtaagttttctctccaatgtcagagctccactgatttgtgttttgagctctccgagtttctttgagcaaatttctgttccaaactgggtttggaagtcatgacagaaactgggctggttcaaggaatggatttgatctggtaattaactggcttggatacagttagaggcctcttacatctgactgggtcagaaagaaatgtagtaaatggtaatattgcaggggtgtaaaattaggctattgaaaattcacagggatttttgtgttttacccctttgtttcttttttttttttttttgagacagtctcaccttgttgcccaggctggagtgcagtggcgcaatctcagctcactgcactctctgcctcccagattcaagtgattctcctgcctcagcctcctgaggagctgggattacaggcgtctaccaccacgccctgctaattttttgtatttttagtagagatggggtttcaccatgttggccaggctggtctcgaactcctgacctcaggtgatccacccgcctcggcctcccaaagagctgggataacaagtgtgagccactgcacccggccttgtttcatttttcttatgcactttggtaggagaaaaatcattggctaggttgatcaaaggaacctgagagcaaagccaaaatctgaggtaaaaattgaatccttaatttcttttttttctttaatttgagacggagtctcgctctgtcgcccaggctgaagtgcagtggcgtgatctcggctcactgcaagctccgcctcccgggttcacgccattctcctgcctcagcctcccaagtagctgggactacaagcacccgccaccacgcccggctaattttttttgtatttttagtagagacggggtttcaccgtgttagccaggatggtctcgatctcctgacctcgtgatccgcccacctcgcctcccaaagtgctgggattacaagcatgagccaccgcgcccggcctggatccttaatttctgaagaactgagttccttctggctaatacctgcataagtggtaggccccggaagcagcagtcttatagaaatggtgaaatcttactaaagataacttagagtggaatgttccaaatgaacaaaactgcactgaagtgcatttgaaaatgagggctcccaagttagtctcatctagggatgtctattgatatgcagaagcttctaaaaagatttcagtatttttatttaaagactttacaaaaggcaaatcgaaagcttatgcgactcattgacttaaaaaattaaatctgctagccttttagcttagttacgatcccgatccaaaggaaatagaccgcagcaccaatgggctgactttgggtgagtagtgggttcattttacctggtaaaggatgggattgggttggaggccttccccctcagtaaagtccctctttgttaaacgtggatttggcaccatggggttaaccactattctctttggagtgatctgccttgcactctttgctaacaccagtgggtgataggattaggcgtgtaccaggccatagaacgtggggaactttttctccccaaaggggaaaatttgggagctgatgggactgctcgaaaagatccttcacgaccaacaatcagccgcctgaacttttgattcagcatccctgcaatgggtgggtctttctctggcctccctgagctcctcatcttccccactctgccacaggcaatgcttttctccctttctcttctttccctttcttttctgttaaaagggcgtccatcttgcccaaagatcacatgttgaaactcctttaatccactttgaatgtattaaagatgatagggaccaactgggggcaagtttgagcctcacaagttcgatagtgggtgctaagcagagtggctaatgtctatgttttgtcacatgtatttttctctggccagaatggaaaacattaatttgggtcctccatgcagctagttgggtggcaacttgcaaaattgagaggcttttgcctatggttacaaactttgctacagattcctgaaacaagcagaaaactgaatgaggtctccatcttgttttatgtcctggggagcttgaccttgtaacagcgtggcagtactttctcttggtctctgccatctagggaaaaggaattttggggctcatatcatagttagctctaaaaattattttgagtagttaaaagccattgcaagctcaaaattgattgctctagactctttgtgggaaaagcagtggaaactgcccaatgttttagctcagcagctaagggtttgccattttataatggcagcctgggttctatcctagcttacagaatgagtacattctggtggacatctctgtgacctttaccgtttgttgattcccttcccctccattaacaacttctggcttcccttcttaaattttcctttctctgagctacctttgaagattcttaattttgtaaaaattgaaaatacctcatacactcatggttaagtcataaccttagttgaggtttgttggtttcactcgtagagttacttacggtaaagtttaaaagccagatatattggctgtttgccctggctaaactagagtaatgagaaattaaaagaacatttttgtgagtgctgtggttaaaagtcagtttaattaaagctgacttggatacatatatccaagctatatgtatatttaaatggcctttatgggtttttattcccttcttggatcttatttttctgaagaaaataggtttgtttgttttttcttctcagtcaactgaattgtttttctccattttgtcttcttgccacacttaatgcacacatgagaagacctaagataacttccaatagtctgggactccttaggaaaaacagaggaagtgccatagacccggttttgggaaaaaaactcgattttcctcatgaaaccccaggaattgaaagtaaatagattttgcattgtgttatctgaaggttttcagttttgggggtatcaaaaattacttgcattataagagaactttcgtgtgtaataactaggtaggaaatatacttttagagatggttaatggcagttatggggggatactaaccatgcttgaatcagagaagcatgctcttggccacctagaaggtacggaaaaatccccaccccctactaggagtcaaattaattgactctcacgggggacaggctgattgcaaaatgggctgattggctttgggttgccatgcaattaaatgcatggtaaaagcattgcactgtcttctatagcattttcctctttttagggatctgggatgtaatataaaaatgggacccttaattttggagatctgtttttgtcattcagttgtgcctccttattaggtcctagaaaccgcatcctttcctggccctgctccttgaaggaccccaccctgaagccagtaatctaattaagaaacttaaaaactggcaaatgaaaaatcttacaactagtggatctttttctatctgtgtagttatatatgtgtcgtgtgtgtgatgtttatataaatgaactctaagtaactggcttaaagaaaaataaggcttaaataaaatattttgaaagaaaaaactgtaatgccttgtagttcacgtgactttagtaatctctgagaaataaaaacagttttaaagattactggtaaaataaagacatttggtctaaattaggtaggtcaggctgggtgcagtggctcatgctcataatcacagcactttgggaagccaaggcaggcagatccctggagtcaggagttcaagaccagcctggccaacgcggtaaagccccatctctactaaaaatacaaaaattagccggacatggtggcacatgcttgtaatcccacctactcaggaggctgaggcaggagaattgcttgagcccgggaggtggaggttgcagtgagccaggatcgcaacactgcactccagcctgggcggcagagcaagactccatctcaaaaaaaataataataaaataaaataagtaaataaattaggtaggtcagatattaggtttactaaatgctttaaggtcataaactgcttctttggcttttgaaaattgttcaacttgcctgcttaacagctaggtcagacctaaggacatgtggaattaaccactcccctagctatgctgaaaagggtcagaccttatctgtacttctgtctggtgtcctaggctccaaacctagtacgtaattaaaatcacttacttaacagggttttcaccaaaaattaatattgctaagaattaacattgtaacatgtaattaagactactaaaaaaagttgtacatgcaaagtgtatgaggaaagcaaaatgtgcttttactaaaagattataacaaggcatggaaatgtaaatttttgcctagtttagagggttaaagtattgttttaaattaggataaagctaaaggtttgaacaagttgtgaaacagttgtgaaaaattaattgtaacagagattctatgtatgaacatattggctaaatttaaaggggtattactcagttttttctgtaaattgaacattggaataaaaccacaacagtttccttagagcactgatctgctctttaacaaaaatggtaaagggttataaaaaagacttatgagaatcttatcttatagtcagacattaaaattgaacatatttgtctataaggttttattaagaatggggtttgacatcaataatgcactaatgcaatgctaaaattggctttctctcttgaacaagatttttatgctatatttttaaaaatgaaacatttttgtttgccttttgaataaactaccaaaaaaagaagggaaagacgagacagattgtttggaaagctaagtcttccctccatcaatgagtaaaggtttatgccttttatatttttgagtcatcattttggctaaatgaatgacttatgttgacctgggattctatttcataatattaagtgttttaaaccttaataacatatttgataagcttcccaaaatcaaatttcagcttcaaaattgtcttttctgacctctaactttgaggtgctacagagggcccctgaagcatccaaaagagaggttaacaggattatttgacatgttaagttacatgagaagcattgtcaaaataaaaactaatgtttaaccttcttcaggctatattttagtgaatgatattaatatatgttccaaaattatatggggtttctaaaattctaatatgtctgagtatatgctatcaatcatagttattatgttaagttattgtaaaccacagaaataaccaaattttcttgtcaattctgtttttaactacgcctatttaaagtcatttccacagttatttgcttactgctgatgctgtaagatcttggtgtgtgtgtatatgtgtttagatgtgtttacacatatgtacatgtattgtgttttatgttgtgtctacatggcaaaatctggcatagctggccaaaaattccttaaagaattctatttagataaatgagcactcatataaaatatacagcaatgaacaaaaatttttttcgttcacatgacttaagtaaatattggatatattaattggcttcaaaattgttgataacataaaattagaaatgtcccaaaattgtcaacatatattttttgcctgggtgaactgattagacagtttatttgcttctgttagatcctttaaggttataaagctgtgaacccagcctaaaacagaatgatttttgtgcaattctttgataagtaagattattttaatattgttgattcaataaaaacagctatagcttgtgagttatcaaccaaatacccatttatttaactttaaggctcttacttaggtaaacacttgatattaacaggctaccaagttggctaataaaagaacttaatgactagctctaatacctcaattttcatagtaaactctagatatagttgttaaaaaaaattagatgattatacatataaactctagatataattgttaaaaagattaggtgactataaatagaataaacatttataaataaacttttcatgtaatctaaaatcttaaagttatggtaaattaaataataggtactcattaaatgtccggttcatatccaaataagaaaaaaccaacaaattgctaaataaatacaagtttgttcttggcttcttcaattttataataatactaaatatatttaggtttattaatcaaaatataagtaatatgaaaaaaataatttatttgagaaagactcttatgtggtaaattgttgtcctaaagcaaaacgactagttatttaagaaacaggacgtatagaaaaaagcaaaaaaaacaagtatgtcaactatggtccaagtaagtcataaaaaggttcataaagggggaagttatgaaataaattttgtgtatgatcaagttgtttataattagaagggaattatttataaatgtttctaaagattaaaatttgatactaaaaatacactaatactaaaccaaaaaaatgtggccccctatttagaacaacaaagtttttttgaagtattggtctgctcttaataaaattgcaaaagggttttatttttaattctaaaatctgttttttttaacaacaatcttctaaactgcagccagtgtcagtatctgccacatttcctgagatctaattaatttccctagttttggcttaaaaatatggtcctctttatttacaatggtaattcattccttgaggtaaagttttccttttgaaatttctcaaatttttgtctcagaagttcaacttctgctgtaccttgcagcacatgacttgcagcaaaagatccttgccttctgaactttctccccttgaaaaggtgtattttttgcttggctggggtgataattctctccttcaaccttttttgtcaactcttacatcttttttttttcccgccagttctacctctgctattatggtctgatgctgaagtgtttctcttaaaagcctagaaaagcaatgttttcctccaatataatttgattctatactcttggcttttctcaatatgtctgaattgtaccattgtaaccaggaagcttttccatgctgttactaagagccatgtattttctttctcaaggtactagttttcttgtttacattcttctataatatagtgtatactcacaatcttggacatattcttcctgtgtgggattaaaatcaagtatatttttcattaggttcaacttacaggttatattagtgagattctggtaaggagaaacagtcattctgcagattttctttttaactttttggttactgagccaaaaaaaaaaaaaaaccattttatcaagataatttattgtgttgtctttattaggtttttgattacttagaaaaactgatattgaaaaaggttaaggtgtttacatccatgtaactttctatattgcttctgaaacctcgactatcactttagttaagtgaatgactattatttttcagtgatctgtgattctgtttcaatcaaatattttaagttttttacatcattgacaaacttccccaaaatcaaatcctaacctaagtcttcatgacctagaattaaccttgggatttttctaatttggtccctggaaagtctcaagagatatacctctcatcttgtagatggggatattaaatgattactgttatttggtaaatcatacaaaaaacattgtcaaatgataagtgatactagatcttcttttagttgcatttattggtatgttgttgatatgaaagttctgaaaattctgtaaatttataaaaatatcagatgagaaaaaaagaaaaaagtataaacaaatttatagaaatatgtcttagtcataattctggttatcttaaaatgctatatataatagaaataacgaaatttccttgttgattataaactttcgtcagatttttaactatggctattctaagtttttgtcatccacagttttgaattcttctctaaaaacatttacaatcagattaatggaaaagattctaataaatactcttaaatacaggtttctgttaactttaagatcaatagactaaataaaaatgtccagatctctactaaataaattgatgggttcatgaaactagtaatcaagatcaatcaggacaaaaattaattacatgaattaagtaattgataaagatatttttggccaggcatggtggctcacgcccagcactttgggaggccgagatgggtggatcacgacgtcaggagatcaagaccatcctggctaacacagtgaaaccccatctctactaaaaatacaaaaaattagccaggcatggtggtgggcacctgtagtcccacctatttgggaggctgaggcaggagaatggtgtgaacccaggaggcggagcttgcagtgagctgagatcgtgccactgcactccggcctggacaacagaggaacactggtggtgagcacctgtaattccagttactcaggaggctgaggcaggagaatagtttgaacccaggaggcggaggttataatgagctgagatcatgccactgcacttcagcctgggtgaccaaacgagactctatctcaaaaaaaaataatatttttataacttttatttaaaacattgttgattcttgtcttaaatattttgttctccagatttaaggaaaaaatttctctttatctataatttacagcaatttgataaagtatacttttttaaacaaagataaaagcatttggtgttttctccttacttgattcttccagaattcaaaaactatttgtgagtattcttatggcaatatgattatttgcctaagtgcaatgaaaatccattctcttcagcggggcacaatggctcgtgcctgtaatcccagcactttgggaggccaaggcgggcggatcacctgaggtcaggagctcaagacccacctggccaacatggcaaaactccatctatactaaaaaaaaatacaaaaattagctgatcattgtggttcacacttgtaatcccagctactcgggaggctgaggcacaggaattgattgaacctgagaggcagagattgcagtgagccaagatcatgccactgcattcctgggagagtgagcctgggagacagagcgagaccacatctaaaaaaaaaaaaaaaaaaaaaaaaaaaaaaatccattctctttctatagcagaatataattgattatattaccaaggctttgactaaaatgtcatatttgaagaatgcacaaaatgcctgacttcaagggttaccagccttacaatgagtacattaaaattgtcatttcctggcacaggaaccttaaaactgtaagcaaaatctaaagtctgcctcagtttggcttcccagtctcaaagttttaaatctgaggttcttacgtgatcaatgttaaaaattttaaaacctgtgtttctaaagttataatatgcctcttaataaatgataactctacattgtgtttgagttcttgctatttacctatagactagtatagacctaaattcttctgggttcctctaatccaactttccctcataaaattaccaaaacatgaactgttctatttctaaagctgaaagtagacaaattttaaggaacatgtctcatgactgatgtatgtgccacacagaaagttcaccaaaaggcctgatgccataaccagaggcattcaaactgcacaccagaatgagaaattgatgtttttcatgggatagacagcttttcccaagacagtatggttgatcagcaatggttttggagaaagatcttgatcaaaagggagccataagaaagaagattatgcaaattgggccattcctattacacctgactaaatccaaattgaagggcccggcggggaaaattacttgaggcacatagcacctgctccaagaattacatttttcacaagctcaactgctgaagcttcctgttgtaacctgaaaccagttttatctaacagctactaaaacaatctgctgtgactctacccaccaccatccctcactagtcagagccaccagctctccaaaactttactaatgcaaaataactttctttcaaatgatacataacatttatcctttttgtaaaacctcccatcttttctttgttctttgaacagacctaagactacccactctgtgtgtatgccccaatttgcaattcttgcttccaaataaaatgttttaaatttagacattcatctctaatcttttattttatcttttatttgacattgacaagctcaaagctccctccattccatttctctgacatctctagtgtgccatcctcacctgcttgcagagctggctataggcagtgggaagcaggacagcagggagaaggcacgcccttagttcatcagcagcacacagaccccccactcacattcattggacagaatttagccacgtggccatatcaacctgcatgtagtccagccttgtactctgaaagaagaggaaactggaatctggtagaccactagcagcctttctatctttttgcactgaattctggagtatcccttgccttgttcttctacatcactaattctctatgtatgttatcatgatactaatcctaatcattaagttatttagtttattttgacaatcatatctttcattgccaagatctaattatttcatttctataatcacttgttcttgatatactttcattcctcttgagatatttccttcttctaaaatctcttcttcaggctgggcacagtggatcacgcctgtaatcccagcactttgggaggccgagtcaggcagatcacttgagatcaggagtttgagaccagcctggccaacatggtgaaaccccgtctctactgcaaatacaaaaattagccgggcatggtggtgctgcgcctataatcccagctactcgggaggctgaggtaggacaatcgcttgaacccgggagacagaggttgcagtgagccgagatcgcgccactgaactccagcctgggcgccagagagagatttcatctcaaaaagtaaaaataaataaataaataaataaataaataaataaaatctcttcattcaattaactctatttccttggtgctggtattcaattgtgacttttttcacaattgtttatgtcttgtttgaatacctgtctttgacctaaggttctctgagatccttcagtgagcattatctttgttacctgcaagcagtgaaggctgtctccagggctggggaggtggagagaattctactgggctgagtgtgccagtagttagtgttctatgcatgggaggtccccagtgcttctggggctaccttcacactcctactcaagtgcccgctcccaaagttgcctgctgctgggtgaaggaggacagagccaacaatctcaactctggttcctgtcaatgaaagaaaaaaatcaggcttttcgataattaaagttagttttattcagaagtctcactgaggattgcaacccaggagagcctttcacagaacttctgctagactgctccaaagcaatgtggcagcccacagcttctatactggcggtggaggttttgcatgtgctcagaagttacattagagcagaatctcctcaatgtttgggtgcacctggttatagattatagaagcataatctctaatcctcttgaacattgtcttatgtacaagaagaggcaaaagctaggatcattgaacttatctttttcttaaaatgtagtgatttaggcaagagagatggcagcctgtgctctatcctgcttatcatcttcagggcattcttctggagggctgcactcagccactgagtcaggggcttcgtaaaattctgctggcaaggagaatgaacaaatgtggcttcgtatgtgtagtattttgtctcatattcccaagaggtttgcctgctgtggctccagggccctctgctccttctacgtgcctcttccctgctggaagcactccataagccccccacactttctcactggtcctccactgcacacagtgtgggttatagtttcctctgctcaccaaatcccttctttcatccttcgaggagtccttgtattttctggaccattaagagtaatgtgacaggattctggggatgcagggaaagagacgagtcatgagtccgggatgcctctcaagtccatctcaccgccaccccataatattgttcagaacaacattcctacttccagccagaagccatggcaaatatttggtgcaattttgagaaggaatcagaggcaaagaaaacagctccttggtgtcagctccactatgactgctggtcaatgcatagcaattggcagaagcacaccttctgtgaggttaaagctaaggtgggcaagtgtgccatcagaaggacattgtaacactgtgcctttatccaagagtgatagtgcctcccctcttagagagagcatcagaaaaacaatttagaaatgtgtaacgctggcaattccagtctccaggcctattcggaggctccttcttcccctcactgttcactccttgtgctaggatctctgtatttcccttccaatgcctttaggtctggtttctggcactccagtcctagattgagcacaggatgggtctaaggagcacctttgctatcacacagggcatggaaacccgtttcttggggtgtccctccaagcactcctggttctccccggtcgcaccatctcctccccaatggccggtgctccccagtcacattgtcttctccccgcagtcctccgtccccaggagcatcccggggcttccaaatgccaatttcacgtgcaggtactgtactcacttatcttgctgactatgccaaattaagtgtgtgtgtgtttatgtgatatatcatgtggggtatgtgtgtggcacatgtgagtatggtgtatgtgcggtgtgtatgtggtatattgtgtggatgtgtgcgtgttgtgtggtatgtgtgacgtattatgtagagtgtgtgtggtatgtgtggtgtgtgaggtgtgtagtgcgtgctgtgttatgtggtgtgtgtgatgtgtgtatgctgtgtgtgtattttgtgtgtgtgttgtattgtgtagggtatgtgagtggcatgtgtttcacgtgtggtgtactgtttggggtgtgtgtatgctgtgtgttatgtgtatgtggtgtgtgtgtggtgtgctgtgatgtgtggtgtgtatatgtggtgtgtttgtgctgtattgtgtggtatgtgtatagggtgtactgtatggggtgttagtatgtgtgtctgtatgtgatgtgtgtggtgtgtggggggtgtattctgtggtgtgtgtggtgtgtgtagtgtgtggtgtgtgtagtgtgtgtgtgtggtgcagtgtgtgtggtgcattgtgtgatgtgcatgtgtggtgtgtgaggggggtatattctgtggtgtgtgtgtggtgtatatggtgtgtgtggcgtgtgtagtgtgtgtgtggtccagtgtgtggtgcagtgtttggcatgtgtgtggtgtgtgtgtggtgtattctgtggtgtgtgatgtgtgtggtgaaatgggtggtgtgtgtgtgtggtgtgtggcgtctgtgtgtgatgtgtgttctgtgtgtgtgtttgagtggagagatccttcaacctgaaggatcctgagcctttctcttcaggacaggtgaggacaccttagctggtggctgtgtttcctgccctggggagtcagccgagcggagccccaccatggctaggtgttacatatgttcagtatcacctctgacttcaaaaaagcgagcacccccatttccaggaatcgcctgggaaccgtttcaaaggagtcatgccagccaggacagagagctgggaagcgggaccacaggagcaactctgaacagtcattggatgcgctctccaaccagctgctctgctcacctcaaagcacacaccaaagagagggagaggctctgagcccatgcgggtgaatcagggtgagccacgcaaatctgctggcccctggcagtcatggcagatgctgccaggaggcctccctcattactcggagtaggcttgaagtcatgctttccagtgtgaggtgcgcgagccaagcaaaggaggaggcctggtcaggaggggggagttccctgtgacaatggaatgaaaaggctgctgcagggcccagctggccctgggcacggtgtggggaggggaatccgcaaaccaggcagagccctccagcccagggcgttagttgttgacccatctttcctccccaccaccagactgggagtcctcatcctttgcgctttgcagtttaggaagcaatctctgaagagcacaaacctatttaacaatgataaaacttcggctttaaagggctgatgtggcacactggcactagagccaggacacatgagggagatctctcttctcccgctcagcagctggcctcccttctgagggcccacctcggactgactggaggacaccacttggaatggcaaagatgggggcaatgcaaaggccacaaggatggcttcatagacaggatgtggacttggcattgggcagacctggatttaaattccagctctgcctcagtctgttttccattaaatgaagatacttgtgcaagggttctgtgagaattccagtggctgaagtgtgaagcattccccactcagggttgcacagctgggactgggtgaacactgttagtaccctcaccctgtgtgctgcagctgcatcagggccagctgcccttctcacaagcacctatgcacagatagcccccatttcaccccaaaggacaactattcagagaattaccatccatcaagccagggcactccaatcagaggaaggtgtcacttcctggtaggacaactagaagggcaggagctattcactgagcataagaggaaggcatggtacaggtggggcatttgtggagagcaagacagggagcagagaagtttctggcaacatgctgctcccagaggaatagggctgccacacctggtaccaggaaactggggaatggccacagctcagctctgccactcaagaaccccacttgccacctgcataggaaaagacaacattgtggccacagaagggtgaggggccccacagaactggggatgccaggacacttggtccatgggaagctgccttttgctctggcctgtgcctggaagcaaaaccatcatccataactccatctaaggattcttagagcagatactagctggaccacaaggggcagcccaaacctttctgttccatcccatggcctggcccttgctggcccacagctcacagaatctgctggggctccccagctcaggcagtacaatactctgttgaccatacgctgacaggtcgggcactgctcttcctagttggacctgatactagtcatgattcactcacctatgcagaagcctgtgcatgcaacaaggcttagcccttctcccatggagatgaaccttctgttcctccctcctgctttcaccacccccaccctacccaaagaagaggaagaaaacagagtagctttggcaaccttttctacccctctcccaggcaagaaaagcagaagaacaacctgaagaaccaggcttctctcctatatcctccatctcgccttcagcctgcatcccttcttactaccctctctccattataatttgctctctgtacattttaaatcaatcaaattagcaaaataaatcatgaaaaccctatacatttataaacatagtaatatgtgatgctcataagatgcaaggagatgggtactttcatagtgttgatagtaggaatataaactgaaaatgctttttttggtaaggcaatttagccatttatatcaaaacattaaaaatgttcatccctcagacccaggcattcagtctcagcaatgtatcctagagaaatctaaaatacaaaagtcacaaagctcaatgcaagaaaatgttatcatcttgctaattacaaaagtggaaaattgaaaacaatttcaatttacaatatatggaactggttaagtaaatatagcaatgggatacaacattggacaggctctaaaacagtgtttaaccagaattattaaacattcattttgtagtatgaagtgactatagcaatgtaatacaacattgggtagactctaacatggtgtttattcagaatttgttttgttttgttttgagacagggtctcactctgttgcccaggctagagtgccatggcatgatcatggctcactgcagccttgacttccccaggctcaggcaatcctcctgcctcagtcttctgagtagctgggactgcaggcatgcaccaccaatcctgtctgttttttttttttttttttttctatttatttgtagagatgggatttcaccatgtttctcaggctggtcttgaactcctgagttcaagtgacccgcctgctttggcctcccaaagtgctgacattactggcatgagccactgtgcctggcctattcaaaattctaaatgtttactttgtagtgtaaaatacatgtggtaaatttattttaatatggatcctataaaatttcatatacagtatcaatctcaaagacatttaaaggtttttttttcaaataataggaaattgaatgaaaaggaataaagcaaaatgttgactggttgtcatcaagtaataactgtgtattatttattttcattcatatattcctaaattttctaaaaggtttatactgttttgaattttttttaatctttaaggaaatcaacttttatagcttagagtgggtaaattttaattaatatgttccttttgtcaggaatatttgcaatctaaacacactttaaactttggcttttctcttgtaccaccctgttgccatttaccaaactatagtattcacagcctatatgtttattattgcttcagtcctcattgattgtatcctatggactatgcacctatttaatcctcatacagagtatactctgtaaagtatgctgtctgacactgaaagtcagaaagtttgagttgcttgctcaggataccaaaggtcatcagcagaggctgcttgatactgtcagtacttttcagatagtcactctatcagggctttagtccacagtgctcctgtggatgctaaccctacctgggattgctctccttttccttgagccctcctgtcttaggctgttttgtgttgctataacagaataccataccctgggtaatttataaagagaagaaatttatttggctcacaattatggaggctgtgaagtccaagagcatggcaccagcatctctgctttcatgttgcatcatcccatgatagaaggtggaagggcaagcaagcacatgaaacagagaagggagggggccgaacttgatccttttatcagaaacccactcctacaataacagcattaatccattcatgcaggcagagccctcatgagctaatcacccctcaaagcaccctcctcttaatatcatcgcaatggcaattaaattacaacatgagttttggaggcaatgctcaagccatagcacttctcaagaagggcaccagcagaatatgcttgtgatcgctctgaatctccatcaggtcatagcatggaatgaaggtatctggtttactcaagcatccctcccacggcctgaggtcccaagattggattttctgttcccatcattggaaagcagaggaatccttgtggaagtgcatctgccttcacaggaccacaccaggagcaggaattgtaaaatccacctctgctctcccaagagagaaggagagggagggaaggagcacatttggcaactgagagcatgcaacagaaaccattccttggagatcctatggggcaagcaatggaagggacactaatttccatctggaaaagatatggccagagctctgacttcaaactctggaaggaaggtgggggctgacccctattgaggatcttctgggcaccagatgctggactgggtatttaattctagtcaatttattgagggaatgagactccaaaaggtgaaataccttacccacagtcatgcagctggtaggtgacagagatggagctgaacccagactcttcctcttatccagtcacataccgagaccctgcattgccgttggaagctatttgcctttcttctcagcactctgggtgtcgtttgcgtgctctctctctctctttctctcagtaacttcagactagagaatggggtaccaaggtcactgataaggaagcccagggcctgggggtaaattttagtgagtcggcagtcctcaatactcagacagatcatcttcttcatgatgatgaagcaccatcaggagcttaccatttggagagataggatggcttaaccctgaatctgtgcctgactggggtctcataccctggggattttatagtgtaagctcaggaaagggattctgatgcctgagcagagagaatgccctaattaagaatgacggccagtttggacaatctccctgaatcccaccgacaaaagaaacaatggcttcccaatgacatgggtctcaagatggacttgggcagagcaggaacatgcaggggggttggtggtcttccaggaggcagggataaagcccccagcaggaggaagggccccccaaggctctccttcctatctctatctctggtcagtatgagactgagtcattcacttagctaaggaccagacaattaaagcacaggaacagatccaagcagatgtataaatctattatatggtgaagtcatactataggtcagtgaggaaaggatgagttccttaaaaaatatattgacacatctggttatccatttttaaagaaaataaagttaaattcctatcacataccatgtacaaaatttccagatagattgaatagctaaatgtaaataaataaataaatacacacacacacacacacacacacacacacacacatatatattatattataagaaaatgttgtgtaaccttacaatgaggatttctacttaaataaaataggaaacctaggcgaggtgtaatggctcatgcttgttatcccagcatcacttgagctcacaagtttgagaccagtctaggcaacgtggcaaaactccatctcaaaaaaaaaaattagccaggcatggtggtgtgtgcctgtagtatcagctattcgggagactgaagtgggaggatggcttgagcccaggaagtggcggttgcagtgagccaagatcccaccactgcattccagcctgggcaatagagccagaccttgtctcgaaaaacaaacaaacaaaacaaaacaaaacaaaacaaaaaacaggaactctagagcccataaagagaaaaactaacttgataaatttggttacataaactttttaaactcctgattttgtaagccattaaacagttttttactagactagaagaaaataattgcaatacttaaaatagacaaaaggtttatatccctgatatgaaaagtttatgaaattaataataaaaagacgactataaaacagataaaggacacaaagggcaattaacagaagagattatacaaatgaacaatagcatgttacaagacaacagtgttgggataatgcaaattaaaattcatcagtttagcaaatgtttaaaatgttggtaccagtagtctaattttgatgacactataaattgctacaatgattttgagaattaacctgacagttactgctgacattttaatctggatgcccttggatgccacttctggaaaaggccagggatcataatcaaaacattaagttactcttacatcacaagcatgccctgatcagaacagacactgaccacaataaccaacaagactgtagcatacttaaaaatagatgtatacgagtatgctccttgtacaattgtttatgttagcaaacaaacaagcaaacctggaaacaatccaaagtttcatctatagggagaagaataactaaattatgaaggatcatcaatctggaaccactgcagctctttaaaaaagaaaaagaaggtaaaactactattattgccctggcaggatatccactatagctgtaaaaaaaaaaaaaaaaaaaaaaagtttagaaaataaaaataaacaaaggaagtaattcaattgtagctcttcaaactgagatggtaataacagcaattacttaagtacagtgtaattatgtcttcctgggggttggttacatcttggcaaagtttatcacagcaagaattggttttggcttctggggttggagccttagattggagatagaaaaaaaacctcaaaggaagcattcctgtccagaaggtaaagtgattcccacccccctcttccctgctacaaaaggtcatggctttggggggcactgaggtctggcatcaacccttaagtttatttttcccataaggaaaagcacaggagtctcatgctagcactttagagaaccaagcatgtggatctacagttccagggaagtccctgactcggggacacccttctcctgaaatccccacactcagtcagggccctgtcatgtgttcccatggcccccagttctcttcttggtggcacataccacacgggtcatttatgttaggatatgtacctctttttccctccatgagactctcagggggtcaccatcatccccagcacctagacagtgcccagagctttgcatatacagggtaaatatttaccacgaataaatgaaattagtaaggggctacaagaacccaagatgattgaagagatataccaagaaatgatcaaatgacagccagagtgtcagtcactcagctggttccaaatgcctaataaaaattaactccctctgtccttaccacagccctatgaggtggccacacttattgtgctcactttatgatggggaaacaggagcatagaagttgggcaactttccaaagtcacaccgtgagcgattccacaacaaggggttgaacccaggctgtctgggtccagaggtcttgttcttaaccacagtgggctgctgcctcttctccctaagctagtgcatcctggaggtcctcagaatgacttgaactggccagagggtaaacgtctgctgaaggaatgaatgggcaatgaatttctaggaacctggggccctggggtctgggaaggccgttgcctccccaagggaatgacacagggccagtctgctctccttctgtgtgggcccctggacactggtctggcattgtccagacaccaaagcacatccgcatagcatgcatcaaacaaatggtgacctgctaatgaggaaatggctaaaacaggaagccatgaccagagtacatgcttcatgcctccagccccgcattgggtaatggaagggcaattacttctccacctcttcacctatacagggcagacttgcctagaagttcagagtccttcctgccaatttggcatcctttcttccagagtgttcccaggctaggtggggatgggaaaagccacaaggagcacagcaggatgatagagatgtggccaatgggcaatgctggcactgccaccctggccagaagagctcactgtgggacactttctcattgtttactagggaagaggaggttggtttggaattcattttgatttgttgttgtaaattctctttgctgtcccaatttaaacaaaaaagaaaatggagaaggggagtttttaatcaaatggattttcacttgggttttatcatgaacctggaactgctttgaaagctgaagccagctgggcttctgggtcgggtggggacttggagagcttttctgtctagctggaggattgtaaatgcaccaatcagtgctctgtgtctagctagaggattgtaaatgcatcaatcagcattctgtaaaaatggaccaattggcactctgtaaaatggaccaatcagcagcactctgtaaaacggaccaatcagcaggacatgggcggggccaaacaagggaataaaagctggccacctgctccagcagtggcaaccagtccctttctgcactgtgggtgttttgttcttttgctcttcataatgaatcttgctgctgctcagtgtttgggtccgcgccacgtttaagagctgtaacactcaaggggagggtctgcatcttcactcctgaagtcagggagaccatgaacgcacctgaaggagcaaattccagacgcccacctttaagagctgtaacactcactgtgaggtccacagcttcattcttgaagtcaccaagaccgagaacccaccagaaggaataaattcctgacacagcttgattttgtctttggtgagaattaagaagggtcacatccactgatgaccagttgggggatagatttacactggctatgcccagtggtactcaaagagccacaattactctcactgtggagcttccttcagtgacaccagagaccaggaagggagctacctaggagacctcagcctgtggaaatcaaactgtggtgtgagccctcctgttagcgagcagtggtgctggctgctttctcacactgccacttggcaaccagaatacagggacttcaccgtgagtttgagctaaaacttgcctgctagtgaatcttagcataggtaattttgggttaggagaattttggtttctctgatgacttggttgacatctttgagattcagcaagccccaattcagattagacttaaaacttatcagtgcaagtcagacagcagtgattactctgcttgttgagacctagggacatccgtttgaattcagtccgcaccccatggacgagcccagctcaatgccaggaagtttatgaattcctggggccttctagtctcatggttacatctgctgccaaaaaccagatcctatgaagttagttcagtttagtgatcttctcaccaagctgcaggggccatcctgttttgtaccatggtgatgaggcacagagcacaccctctttttaccttcaaagaaagaagccagacattgatacaggttactgtgtatgcagcagactatcctgaaggtttagggagacagagtattgatatctcagatctgcaaacaacagaacagccccttggggatcactatgatccaggcagaaggcagaatttgttttttaatcaaatcaccaattaatgactgaaaacagtatctcctggaacaagaaattattattcctctaggcttgaaacaatatgaaacagaggaaagttatttgcaaaaattggctgaatgtgcaaattatgcttccacgtgaatagcaaagtaattaaaaccattttcagaaagtgaactactttcttaaaacagcatgccgaaagtggtccagagttcaagattttgaaaacaaaaacaaagttggtacttgaattcacagattgaagctaactagaagtcaaagaaaagacacactggattatgagaaggagcagggatcacagccaggtgcagaacaaagtctgagcgtgcctgaccttccctggaggttccgcccatgtcacctgcccactgggtgtttcctgttttgaccatgcattccttagaccttctgttgttaaaattttttctccttgagaactttaactggccagaaattagaatccaattttgaaaataccaagctactttcattatgacactgcagttaagcaaatattacccaaatttggacagccttgtccaaatttgttttatattgttttatatttagcaatataaagcaaagtgtcccatttaaaaattggtaaaaccttataatcaatatgcattaaaaatttttagtatcacatcattattaatggcaaaaatttccatttataaataacagaacttttgttgattgtatttattcttccatcctgggatttggggttttttcaattttgttttttaagtttgtttttaattttttttttttaattcagaaagagaccttgttgccaccctctgcatactcagaaaggaaccccagtccgtgcagaaaggggccacggacagtggctgtccacccaggatgggcccaagaaaggagtcgatgtcctgaaacagtccctgcccctttcctgagtgttgggggatggtgggaacgacgaccatgtagctcctaacaaagggcgtctgcctctgggggtgtcctggggcgtggcttactgagggcttactgaattttaaaaattcagatttcagccaggcacggtagctcacacctgtaatcccagcactttgggaggccaaggtgggcggatcacctgaggtcaggagtttgaaaccagcctggtcaacatagtgaaaccccatctctactaaaaatacaaaaaaattagttgggtgtggtggcatataattgctgtaatcccagctactcgagaggctgaggcaggagaatcgcttgaacctgggaggcagaggttgcagtgagccgagattgcatcattgcagttcagctgggcgacaagagcaagactctgtctcaaaaaaaaaaaaaaaaaaaaaaaaaaattcagatgtccagcttttcatgaaaaaatccaaagttctggtcacacgctggacaacaatagccataggtgagcacctgctgccctgggaacaggcacgtgccctccaggtggtgaatgacccacttctctcaccagcttcaattgtgtccatctaggacatttggaactcttccaggctgctgcactcaccaatggcaccttcctggcctcatgggcatttgagtttgtactcctggccaggacctaatgctgcagaccagataacttcctgggttcttgccctaaaggaggagctgaagccataagcgcagacctctaatgtggctcagagacactgtggagagagggcagtccaggcccagggtcttgacggtcccgcccctggacttattaggccccctctgcatagctcatagtggcagtgataccagacgtcacctaaaccttcccactcctgcggcacccactaccattcagcctcagggccatcctaaccttaactccaggctcctctctcacatgggactattccagctctgactttagctcccatgaagaactggctcccgagtcctggctccccatccaggacccaggttccagtcctctcaatgggctctccctgatagaggtcaccttgggtctggtggcctaccccatttcttacaacatacaccccacaccagccttgggccagccacctcctttgtgccccagaatggctgtcagggaagaccctgcctgtgtgccccaacctgtgggcaaggcaaggcctagggctctgcccaccaggaataacagacccagctagggaaaggcaggctttgagatgcacgtgtgatgttgaccctccccccgggtcaccccaatacccgtctgcctgattctctgttgccccacagggtcccagagagtgctgagctgcacatttgacaggctatgtgcccatgggtccaatgtgtccatggatgacctgaattccaaggccatcaggaaaagcctattgtgttgggcccccaggaagccaagccaggctggctaccctgggatcttcagaggagagcagcctagcttgtacagatcccctccatgggccaggccctagaaatttcacacaaaaaaattatccttttttacagcaactcatgagagagaccatgaggataccattttacagatgagaaaactgagagtgaaggaggtgatgcaaccaatgagtgacagaacatggacatgaaacatgtcttggcaactccagtacccaagatttctccatgtcagctgtcagcctgcctggctcacaaaaccttcatccccagtgtagaaaggactgatagacaagttaggggcttctctctcacagggcccttgtgtgtgcccacccttcacacacatacacccattcacacatacatacatacatctgcacacacaaacacctatggggtccacacacatgcacacaaatacacacacaaacaccctgcatatccacacatacacacaggcatattcacacatatatacgtgcacctgcatacaaacacacacatagacacaaacacccataaatatccacacacacacaaacatgcacatacacacaaatactcatacacaaacaccctacatgttcacacatacaaactcctgcactcacacaaacaccttccatatccacacatccatacatatatattcacacacacacacacacgcatgctcacacacacgagcagagcactggaccaggagcaggagctgggactctcgtcccagatctcccatcacacttctcaagccttggcttcctcatctgtgagatggggttgtgccgcctgcttcccagagtgttgcacaagcaaacatgcatgacagcccaggaagtgagaagggtgtataggaggaaagggtcctgatttttggcagaagttgcccagggagtagtgagtgctccacacctttgtatgtgctgtaccttctctctggagctcttttctcttcttctctggctggtgaactcatcctcaccttccagctccaacaaccacactttgtgttcctgatgtctccctgtagtggaattcctccaccatcctcagtgtccccagctcctgtgtgagacaggacttcctacactggagtgggacacgtgaatgaggctgcatggctcttcggagccggatgagtcccgacttctcctgccacaacccaagtcccttcacagacccacagcacagtctctcagaggtatcttttaaggccagaccctggccttccctttgacagcactgatgcaaagctcctgatgtgactaggagtttaagaaccccctaagtgcccctagctgcctggtatagacctgccagcctctgcccatcctgcttcatctgctctgaccttttgctctctggtggagtccttgccatgatggcctgggcccagtctggtctggcctagggaggcgcttttctgcccaggcatcagggcctgtcctcacgcagagttcagaacacacagaggcaccccatcactctcgaggtaggcctcacacctcgcaagtcagcctcaaaaaagcaagtatgaggcaggatcccctttctggctttgggtaggggctgcagttcctcttgccatgtggaagcttcttaaatattgtactacaatatttaaaaatattccctttgttctacataccattaatagatcaactcttctacagctctgcaatcacttctgacttggcaaagctgagcctgagctcagggaagggctctggcttcagccttgtgaagcagaaagatcgtggactctcgcacaggacccctgtttacatttctctcaagcacagcctcaccttctcagtcctgctccaaaaacaccacacaacttccagttctgagaatgcaccctgttctctcagccctgggctttccacatgctaaccccttctcagaacctcccttccttcacttcgatacctaactgatttctattctccttcaaaaccccattctaacatcacctcttctgggaagcttctctgacttctctgaggccctcccaggctatcatttccttcctgataatggctccttatagcactggccacttatatggaagtggtgcatttgagtctctcccactgcaccatgggttttcaatggaagagtgtgtgtatcattcctctttgtaatcccagctctgtcatcacaagatggaattcaagcatgtacctggtagttgatcaagctctatattcatagagcccaaacccaaacctaaaccaagaagaaagaagaaaataatagaggctagtctagaaataacatagaccaggctaattccttaataataaagacaatagagaaaatacttccccaacccttgctaatgccaatgggaaaaaaatagagaaatctttaaaaaccaaaattggttatttgaaaagattaacaaaattggcaaatctttaactatactgaccagaaaaaagaaagattaaaatcagaaatgaaaaagaagatattacctctaaccttcaaaaataaaaaattataagtgaatgctatgaacaattatatgtcaataaattaaatgacttagatgaactggagaaattcctagaaaaacacagaaaccaaacctgactaaagaagaaatagaaagtctaaagaaacctttaacaactaaagagatgaaattagtaatccaacacctaactgcaaaaagaaagccaagccccaatggcttcattggtgaaattaaacatttaaagaataatttgcgttttaaaaatatttgcatttaaaggagcttttaaagaaaaattattatcaattcttcacaaacttgcaaaaagttaggcataaacacttcccaactcattctatggggccattactattctgatactgaaattagacaaagacatcacaaaaaaagaacactactaatacctcttatgaatatggatacaataataacaaaatactagcaaactaaattcagcaacatataaaaaggattatacacaatgatcaagtgcagtttgtcccaggaatgcagggttggtttaacatccaaaaaatcatcaacgtaataccatattattaattgttctattaatactatattaatagaataaaagatcaaaacctcataatcatctcaatagatacagaaaaaaatgacaaaatacaaaactccttcatagtaaaaacactcagaaagaataaaagagaatttcctcaacctaataaagcgtatatactaaaaaagcagcaacaacaaaaaaaacatagataacatcacatttaatgggaaagacaacatgctttccttctaagatcacaaaagaaacaaggatgtctactcaccacttccattcaacatcatactgaaggttccaactattgcaattatataagggaaaaaaaggcacccagataggaaagaaagatgtaaaatggtctcaattggcagatgacacgatttttctatgtagaaaatcctaagcaattcacaaaaaaattaaaatatgtaaatgaattcagcaagattttagcacatgagatcagtttgcaaaaatcaattctgtttctatacactgtcaatgaacaagacaaaaatgaaattagaaaaataattccatttacaataacatcaaaaaatacttaggaataaagataacaaaagaaatccaaatggtatattccaaaaaatataaaacattgttgaaagaggtcttaaaagatcaaaataaatgaaaatacatatcatgtttttggaccagaagacttattgttaaagatagaaatatcccagagttaatctataagttcaatgcaatctctatcaaaatcccagatgacttctttgcagaaattgacaaggcaatcctcaaatttatatggaaaatcaaggaatgcagaatagccaaaataatcttgaaaaaagaaaaacgaagctggagtactcacgttttccacattcaaaacttactagaaagctacagtaatctaaacagtgtgatactagcataagaacagatcaataaaatagaactgagagtccagaaataaatccatgatctatctacatacatctattgtcaattaactttttttttgagatggaggcttgctctatggcccaggctggagtgcagtggtgctatctcagctcactgcaacctccacctccctggctcaagcaattctcttgcctcagcctcctaagtagctggaattacagacacacaccaccacacctggctaatttttgtatttttagtagatacggggttttgccatgttgcccagctggtctcaaactcctgagctaaaagtgatccgcctgccttggcctcccaaaatgctgggattacatgcatgtgagccaccaggcccaactgtattgtcaattaatttttaacaagagtgccaagaccattcaatgggggaaataataatcaaataatctcttcaacaaatggtgctggaacaactggatatccacatgcaaaagaatgaagttggactcccatcttacaccatatagaaaaattaacttaaagcgggtcaacaacctacatataagagctaaagccataaaactcttagaagaaaacataggagtatatcttcataattttagctttagcaatagagtcttagatatgataccagaagcatgaacaacaaaagaagaactagataaattagacttcataaaaatagtaaactttcgaacatcaaagaaaattaccaacaaagtaaaatcatacatctaataaaggtctggtatccaaagcatttaaagaactcttacagctcatcggcaaaaacacacaactcaattttaaaatgggcaaagacttgaatagacatttctccaaagaaaatatacaaatgccaacaagcacatgaaaagacactcaatatttttattaattagggaaatgcaaatcaaaattgcaatgaggtaccaattcacacccactgtatatatatgtaataggtggatggatatatataatatttatatataattatttataatatgtatatataataatgttattatatgataaattatataatacatatataatttattgatttgagacaggctcttgccatgttatccaggctggagtgcagtgacaccatcacagctcacagtggcctgaacctcccaggatcaagtgatcctccacctcagcttcctgagcagctaagaggtactacaggcaggcataaccatgccctactaatttcttaatttttttgtagagacaggatctcactatgttgcccaggctggtctcaaattcctggcctcaagctatcctcccaaagtgctggcattagaggcatgagccactgcacctgacttaggatggatatatttttttcaatggaaaataacaagggctaacaagaatgtagaaaaattggaaccctcagacattgttggtgagaatgtaaaatggcacaactgctgagaaaagtttggtgatttctcaaaaacttaaatatagaattatggtatgatcaagcaattccactcctaggtatatacccagaagaactgacactgactactcaaacaagtacatgtatctttatagcagcactatgaacaatagccaaaaggtggaaacaacccaaatttccataacaaatgaatggataaacaaattgtgatatacaatggaataatagccataaaaaggaatgatgtactgatacatgctggaacatggatgagctaccaatttacaggaaacacagaggacaggggacatgttgaatagcaccatgagagtgcagtcagcaaaatccagactattggaaactctacagatcaaatgacctgggtcttgggagggggtaggaaaacctgtgtattaaccaacttttaaaagatgtatttttataaaataagtgagatttaattatagggtgtagggatatacatgtgggtaataattagactatgaagcaaaggaaaggagtgtctactgtaagtcaaggtagtggtgactttggagaagagagtgaggaggtgcctctggacaaagttctgtttcttagtctaggtggtggttacaaagctttactcttgtaaaaatccattaagccatgcatttgttttatgtggcttcttatagctttgtttatttgcaaataataacctggttcagagattctgattcacagggtgtggggcagagttcaggaatgcttttaaattttcccgtgttgtgtgcgcacacacacacacgcatacatatatatctgtcttccacaccaggctggtgcctgtttgaggaaggtctgtggcttgcctcaatttggacttcccaacctccagaactataagaaataaatttctgttctttatgaattacccagcctcaggtattcttttatagcaacacaaaacaaaccaagacagcttctatctctctcctactgacctatgagcagggcatgctttgtttctgtctttgcattcagcacctagcacacagtaagtgctctgtaaatgctgatgaggctgggctgatacacaggtggactgacagtgggcataccagacaagatccagtggcccctgaagcagtcaactcacccacagcaatgctggagggctatgaacttcccaatctcactgaggaccacaggagcattccacctctactgggcagtaaaatccagaacgccggctgcagacattccacttagagtcatgccaacatcctctctgggccccactagcttaagacagagccacagacacaggcgtccagaattaagagtccatctcagccctgaggctgatttctcactacacactgaccctgagaaaaacttcagggactgcaaaaggcagccagaaacactgggagaagggagggaagaaagcgcctctgaaatagacagaaacactaatgcaccaccagtgcctctttcagacataagccagtccagctccccatgggcaggcccaggatcacacaggacactacaaaccaggtctctgcccaagaaccaggctgtaggggccaccagagcctcactggaacaggttaatgcagaatacagtcatgtacgtccaaacggagctacaggccttccccgttaaagacagtgccctccccggggtagaaaggaaaacaatactccttatcagcatgaccattgtatgttaagtcttgtgatgcatgtttgcaagttactccaagtaactatggatcttgtccccaactcaggccagccagctgacaggccctgaagtcagcagctacagttggctgattctgaacccagtgatgcctgctgtttgcagggaatgagatacttacttaattatctcaaatttaaacactcttatatgtttccttaatttaaaaaccatacacacacagaagtgaggacatctaaaaatgggatctgcgttactgatgtgtaagccagaaaaaaagaggagttctcaaatacactctgagctggacttcacagctacgccagttcctcaagtggttcgtggaggtgagcggcagatgcaggccagtcttagaatgtgaaaaatctgagagctataagacaattcaaaaacagacaataagtcaaatcccattgaattgtgttattttaaatataaagaaagaaatgtacaaacatttaacagaaaattagattccccctgtccccacaaatcaaatccaaaattacccatgtgaaaacttcacggcattatccactttccaccaaggcctccacgtgctcgttctctggccaggccttggtagtgtggactggtcaccatgtaaggacagccttctgtgagctgcagaccaagggaggtggcctggcagcctgttggaggccaggcaaggataaaatttactatcaatccttttttttttttttttgagatggagtcttgctctgttgcccaggctggagtgcagtggtgtgatctcggctcactgcaacctctgcctcctgggtcaagcaattctcctgcctcagcctcccaagtagctgggactacaggtgcatgccaccacacccagctaatttttgtgtatttttagtagagacagggtttcaccatgttggccaggatggtctcaatctcttgacctcgtgatctgcccaccttggcctcccaaagtgctgggattacaggcatgagccaccatgcccagccatcaatccctttttatgtataagaaataggctcagagaggccagatggcatggcccagtttgcacagtaaggtgattgcctgtcacggccaaatagccaccacgtccggataatccatggccactggtttctgtgaggtggtggagaggcggcctcagcctgagccctctggatcgtgggcaacgggtggtgtgaggaaactgtccagcagtgatctactgtccctgcactcccacactgcagggccaggggtgcatctgcatcccacgcggggaatgcctgggcatgaggcttcaagaagcacttagcaggaatgcaccgggtgctcagaggagccgctgtcctggcaggctttgctgtccacatttgcccctttgcacggagcctgctgtccctgaagtgctctgacctgtccacaggaaaccaggtcaggcacaaaataaccacccttgtctcaaagcaagggccctaatgcctccattccttcaatgccttttccttcagccaaggtcccctgcagtcttgtcctgggcactgaactgggtgctggggatgggctggattatgaggaaggaaggtctctgctctcaagaagaagtgggtcccccatcctagggcagaaggcactgccatcctgagtcagcttatcgcagctcagatttcactccctctgtgctgggccctgggaatggggagatgacactgccatggccctgccctcaggggctccccatcacgtggggaagccagacacaaaggtaaatttgggaggaagcccccaatgcctcataagctatcaaaaaccagagtccacagcaatgggaaaaacaaggcaaggaaggtaacctgcaaagaaacgagggctggggaggcaacacgcaaacagccagaggagactgtgaggaggccccccacagactcatcgcctcaaagcggagccccaggaatgaacagtcagctctaggacgtgctaaatgccccaggagaggcacgaaccaggggaccactgacaccactcggccttcggaggtgagaggcggcttcccagaggagggcatattggctgagcaggatttcctcaggtagacacagggggaaaccaagcatcgcaactgaaggccaggtaacacagatctgccgaaagagacatcatgattttcaaacaagcaaacgaaagggattcattctattctgcaactgtcaggcatactcagaccaagagtaatctttcaaataaaccccagaaaatgaaatcacgtatgccatgttctagccccgcagtggaaagtggtttagcctctggtcccggagtcttgcctgtctcttctcccacccacctcccctgcctctctccccttcccagctgcccagaaggtgactaactgcatgtccacttttttttctgctgattcttcccatttctgatattaagtagcactttctctgcaagcaaagctacactgatataatacagatgaaactgggaaagtccaggctaaatttcaggatacgtatacagaaatgcgttgagatacagcacctcactcagcaaccatgccttatagatagtgctaagcttcagtcgcatcacagaactttctaccctgcatgagttctctgacctggctgtgagcttcttgtgggtggggtctcagtcattcccaagcagccagatgtgtctcagtgcctggcatacagaaggcatatgataaatgtttgctgaatgagtaattcacaagtaggtccattgttataaatgaatgttttggaaacacaagctgtcactgagttccacgtgtcgtgttctgctttcgaatgacctgccctgaatatatctcacatgcagtcttgcatatgcctgattcagacttttgctcacagctacggggaggtgttgagctctgcatgggccagcagatccaggcagaaagacttccatgtctgtacagcagcatttgttcattgctccaatggtttattttcccctggttttattaaaatagtgaaaaacactaaagtggaagggcttacactcaagagcaacacaattggaatgacagcatgggttttcaggggtgcccaaagaagtccttcccctctgttgtatgtccctaggtcttaagccactacactgaattcatgtgtgaaggaaaggaacaaaattcaagggtgtgtatgaaatgctagcaatatagccttgaatgctgtacctggatgtagagcaggaagcaaggcttgtaccgtctcttccttacctctctgagaagggaccccaccccaaattgatctgctctggctccgacacaccccctacatacgacccactctgtggaggcaatagggaagtcctgctctgtgtctgaaaatgtcaaagacagcttattcctgggaagccatcaaatacgccctgctctgctgtatatattattcaagtactcagtaaaccctttgtttctggagagcaaaggccactggcagcccaacctctgcccagacaaggaggggacaggcagggagctggcaagggcacacaggatcatggccagagggtgagctcagtgcccagaatctgtccccataggagcacagggtccccaggctttcaattctccagacttcgtttcccagcctataaaatgcgtacaaaactgacatcctctcgggatgttaagattcgatgatattacaaatgtgaaagcactttggaacccataaagtgctgtatcaatactggttgatcgtgctcttattaagattattctattaataacccatctcaaattacatatctgtagacagtgcgtttgtgcatctattgggccagctgctctccaggccgggaagccagaaagatctcatggaggagctggtcctcctacttccttcccttgctaaggccaaacctgcccgaatgagcttcatctagagggcacctctcaggctcagcacctggagcagccctccatgtggacagccgggcctgtccagcccaaccagagggggccgtggattttgtccatggctgtttcccagactccatggcagtgatttagatgcccctgccccctggccgcacgctggaacatgtgcacctggtttctcccggcactgacctacttatccatcagttactcaactgtctactgacgtgtttattgagcatgtcccaaaggccaggtaccagaccacttgctgcatgtgacatgcagacacatatggaaccaggccagcccttgaacaatcacgacaagtgtcccaagtgctacaaaagagaaggaagggatgatgttgcagaaagtggggagggaggggcagtgctaacctgctctggggtctctctcgaaatttccttttgtttgtcctgctgacctttctatgcatgcttttactctgaagtcacaccttttcttaacctgtagaaaattctcggtcatgtcattctaccactccttctactgtatcttctctaccattctctccacattttctccttcagaacattggttgttaaaactcagccattttttaagttctcttccatagtttcatctccttctatctgtgagctgcttttagttttccattcgcaaattgtatctttgactagctcatctattgatttaattatcatagtttttatacctagatttctactcagttttttttcagagccaatctgttcttaatttataccttcctgggtttattttataattactttttatgaatgctatttcttcttctttgtgggtcttaagatgcttaaggctttttggttttgagatttttctcatatttccatttatttggcagtgaattcnnnnnnnnnnnnnnnnnnnnnnnnnnnnnnnnnnnnnnnnnnnnnnnnnnnnnnnnnnnnnnnnnnnnnnnnnnnnnnnnnnnnnnnnnnnnnnnnnnnnnnnnnnnnnnnnnnnnnnnnnnnnnnnnnnnnnnnnnnnnnnnnnnnnnnnnnnnnnnnnnnnnnnnnnnnnnnnnnnnnnnnnnnnnnnnnnnnnnnnnnnnnnnnnnnnnnnnnnnnnnnnnnnnnnnnnnnnnnnnnnnnnnnnnnnnnnnnnnnnnnnnnnnnnnnnnnnnnnnnnnnnnnnnnnnnnnnnnnnnnnnnnnnnnnnnnnnnnnnnnnnnnnnnnnnnnnnnnnnnnnnnnnnnnnnnnnnnnnnnnnnnnnnnnnnnnnnnnnnnnnnnnnnnnnnnnnnnnnnnnnnnnnnnnnnnnnnnnnnnnnnnnnnnnnnnnnnnnnnnnnnnnnnnnnnnnnnnnnnnnnnnnnnnnnnnnnnnnnnnnnnnnnnnnnnnnnnnnnnnnnnnnnnnnnnnnnnnnnnnnnnnnnnnnnnnnnnnnnnnnnnnnnnnnnnnnnnnnnnnnnnnnnnnnnnnnnnnnnnnnnnnnnnnnnnnnnnnnnnnnnnnnnnnnnnnnnnnnnnnnnnnnnnnnnnnnnnnnnnnnnnnnnnnnnnnnnnnnnnnnnnnnnnnnnnnnnnnnnnnnnnnnnnnnnnnnnnnnnnnnnnnnnnnnnnnnnnnnnnnnnnnnnnnnnnnnnnnnnnnnnnnnnnnnnnnnnnnnnnnnnnnnnnnnnnnnnnnnnnnnnnnnnnnnnnnnnnnnnnnnnnnnnnnnnnnnnnnnnnnnnnnnnnnnnnnnnnnnnnnnnnnnnnnnnnnnnnnnnnnnnnnnnnnnnnnnnnnnnnnnnnnnnnnnnnnnnnnnnnnnnnnnnnnnnnnnnnnnnnnnnnnnnnnnnnnnnnnnnnnnnnnnnnnnnnnnnnnnnnnnnnnnnnnnnnnnnnnnnnnnnnnnnnnnnnnnnnnnnnnnnnnnnnnnnnnnnnnnnnnnnnnnnnnnnnnnnnnnnnnnnnnnnnnnnnnnnnnnnnnnnnnnnnnnnnnnnnnnnnnnnnnnnnnnnnnnnnnnnnnnnnnnnnnnnnnnnnnnnnnnnnnnnnnnnnnnnnnnnnnnnnnnnnnnnnnnnnnnnnnnnnnnnnnnnnnnnnnnnnnnnnnnnnnnnnnnnnnnnnnnnnnnnnnnnnnnnnnnnnnnnnnnnnnnnnnnnnnnnnnnnnnnnnnnnnnnnnnnnnnnnnnnnnnnnnnnnnnnnnnnnnnnnnnnnnnnnnnnnnnnnnnnnnnnnnnnnnnnnnnnnnnnnnnnnnnnnnnnnnnnnnnnnnnnnnnnnnnnnnnnnnnnnnnnnnnnnnnnnnnnnnnnnnnnnnnnnnnnnnnnnnnnnnnnnnnnnnnnnnnnnnnnnnnnnnnnnnnnnnnnnnnnnnnnnnnnnnnnnnnnnnnnnnnnnnnnnnnnnnnnnnnnnnnnnnnnnnnnnnnnnnnnnnnnnnnnnnnnnnnnnnnnnnnnnnnnnnnnnnnnnnnnnnnnnnnnnnnnnnnnnnnnnnnnnnnnnnnnnnnnnnnnnnnnnnnnnnnnnnnnnnnnnnnnnnnnnnnnnnnnnnnnnnnnnnnnnnnnnnnnnnnnnnnnnnnnnnnnnnnnnnnnnnnnnnnnnnnnnnnnnnnnnnnnnnnnnnnnnnnnnnnnnnnnnnnnnnnnnnnnnnnnnnnnnnnnnnnnnnnnnnnnnnnnnnnnnnnnnnnnnnnnnnnnnnnnnnnnnnnnnnnnnnnnnnnnnnnnnnnnnnnnnnnnnnnnnnnnnnnnnnnnnnnnnnnnnnnnnnnnnnnnnnnnnnnnnnnnnnnnnnnnnnnnnnnnnnnnnnnnnnnnnnnnnnnnnnnnnnnnnnnnnnnnnnnnnnnnnnnnnnnnnnnnnnnnnnnnnnnnnnnnnnnnnnnnnnnnnnnnnnnnnnnnnnnnnnnnnnnnnnnnnnnnnnnnnnnnnnnnnnnnnnnnnnnnnnnnnnnnnnnnnnnnnnnnnnnnnnnnnnnnnnnnnnnnnnnnnnnnnnnnnnnnnnnnnnnnnnnnnnnnnnnnnnnnnnnnnnnnnnnnnnnnnnnnnnnnnnnnnnnnnnnnnnnnnnnnnnnnnnnnnnnnnnnnnnnnnnnnnnnnnnnnnnnnnnnnnnnnnnnnnnnnnnnnnnnnnnnnnnnnnnnnnnnnnnnnnnnnnnnnnnnnnnnnnnnnnnnnnnnnnnnnnnnnnnnnnnnnnnnnnnnnnnnnnnnnnnnnnnnnnnnnnnnnnnnnnnnnnnnnnnnnnnnnnnnnnnnnnnnnnnnnnnnnnnnnnnnnnnnnnnnnnnnnnnnnnnnnnnnnnnnnnnnnnnnnnnnnnnnnnnnnnnnnnnnnnnnnnnnnnnnnnnnnnnnnnnnnnnnnnnnnnnnnnnnnnnnnnnnnnnnnnnnnnnnnnnnnnnnnnnnnnnnnnnnnnnnnnnnnnnnnnnnnnnnnnnnnnnnnnnnnnnnnnnnnnnnnnnnnnnnnnnnnnnnnnnnnnnnnnnnnnnnnnnnnnnnnnnnnnnnnnnnnnnnnnnnnnnnnnnnnnnnnnnnnnnnnnnnnnnnnnnnnnnnnnnnnnnnnnnnnnnnnnnnnnnnnnnnnnnnnnnnnnnnnnnnnnnnnnnnnnnnnnnnnnnnnnnnnnnnnnnnnnnnnnnnnnnnnnnnnnnnnnnnnnnnnnnnnnnnnnnnnnnnnnnnnnnnnnnnnnnnnnnnnnnnnnnnnnnnnnnnnnnnnnnnnnnnnnnnnnnnnnnnnnnnnnnnnnnnnnnnnnnnnnnnnnnnnnnnnnnnnnnnnnnnnnnnnnnnnnnnnnnnnnnnnnnnnnnnnnnnnnnnnnnnnnnnnnnnnnnnnnnnnnnnnnnnnnnnnnnnnnnnnnnnnnnnnnnnnnnnnnnnnnnnnnnnnnnnnnnnnnnnnnnnnnnnnnnnnnnnnnnnnnnnnnnnnnnnnnnnnnnnnnnnnnnnnnnnnnnnnnnnnnnnnnnnnnnnnnnnnnnnnnnnnnnnnnnnnnnnnnnnnnnnnnnnnnnnnnnnnnnnnnnnnnnnnnnnnnnnnnnnnnnnnnnnnnnnnnnnnnnnnnnnnnnnnnnnnnnnnnnnnnnnnnnnnnnnnnnnnnnnnnnnnnnnnnnnnnnnnnnnnnnnnnnnnnnnnnnnnnnnnnnnnnnnnnnnnnnnnnnnnnnnnnnnnnnnnnnnnnnnnnnnnnnnnnnnnnnnnnnnnnnnnnnnnnnnnnnnnnnnnnnnnnnnnnnnnnnnnnnnnnnnnnnnnnnnnnnnnnnnnnnnnnnnnnnnnnnnnnnnnnnnnnnnnnnnnnnnnnnnnnnnnnnnnnnnnnnnnnnnnnnnnnnnnnnnnnnnnnnnnnnnnnnnnnnnnnnnnnnnnnnnnnnnnnnnnnnnnnnnnnnnnnnnnnnnnnnnnnnnnnnnnnnnnnnnnnnnnnnnnnnnnnnnnnnnnnnnnnnnnnnnnnnnnnnnnnnnnnnnnnnnnnnnnnnnnnnnnnnnnnnnnnnnnnnnnnnnnnnnnnnnnnnnnnnnnnnnnnnnnnnnnnnnnnnnnnnnnnnnnnnnnnnnnnnnnnnnnnnnnnnnnnnnnnnnnnnnnnnnnnnnnnnnnnnnnnnnnnnnnnnnnnnnnnnnnnnnnnnnnnnnnnnnnnnnnnnnnnnnnnnnnnnnnnnnnnnnnnnnnnnnnnnnnnnnnnnnnnnnnnnnnnnnnnnnnnnnnnnnnnnnnnnnnnnnnnnnnnnnnnnnnnnnnnnnnnnnnnnnnnnnnnnnnnnnnnnnnnnnnnnnnnnnnnnnnnnnnnnnnnnnnnnnnnnnnnnnnnnnnnnnnnnnnnnnnnnnnnnnnnnnnnnnnnnnnnnnnnnnnnnnnnnnnnnnnnnnnnnnnnnnnnnnnnnnnnnnnnnnnnnnnnnnnnnnnnnnnnnnnnnnnnnnnnnnnnnnnnnnnnnnnnnnnnnnnnnnnnnnnnnnnnnnnnnnnnnnnnnnnnnnnnnnnnnnnnnnnnnnnnnnnnnnnnnnnnnnnnnnnnnnnnnnnnnnnnnnnnnnnnnnnnnnnnnnnnnnnnnnnnnnnnnnnnnnnnnnnnnnnnnnnnnnnnnnnnnnnnnnnnnnnnnnnnnnnnnnnnnnnnnnnnnnnnnnnnnnnnnnnnnnnnnnnnnnnnnnnnnnnnnnnnnnnnnnnnnnnnnnnnnnnnnnnnnnnnnnnnnnnnnnnnnnnnnnnnnnnnnnnnnnnnnnnnnnnnnnnnnnnnnnnnnnnnnnnnnnnnnnnnnnnnnnnnnnnnnnnnnnnnnnnnnnnnnnnnnnnnnnnnnnnnnnnnnnnnnnnnnnnnnnnnnnnnnnnnnnnnnnnnnnnnnnnnnnnnnnnnnnnnnnnnnnnnnnnnnnnnnnnnnnnnnnnnnnnnnnnnnnnnnnnnnnnnnnnnnnnnnnnnnnnnnnnnnnnnnnnnnnnnnnnnnnnnnnnnnnnnnnnnnnnnnnnnnnnnnnnnnnnnnnnnnnnnnnnnnnnnnnnnnnnnnnnnnnnnnnnnnnnnnnnnnnnnnnnnnnnnnnnnnnnnnnnnnnnnnnnnnnnnnnnnnnnnnnnnnnnnnnnnnnnnnnnnnnnnnnnnnnnnnnnnnnnnnnnnnnnnnnnnnnnnnnnnnnnnnnnnnnnnnnnnnnnnnnnnnnnnnnnnnnnnnnnnnnnnnnnnnnnnnnnnnnnnnnnnnnnnnnnnnnnnnnnnnnnnnnnnnnnnnnnnnnnnnnnnnnnnnnnnnnnnnnnnnnnnnnnnnnnnnnnnnnnnnnnnnnnnnnnnnnnnnnnnnnnnnnnnnnnnnnnnnnnnnnnnnnnnnnnnnnnnnnnnnnnnnnnnnnnnnnnnnnnnnnnnnnnnnnnnnnnnnnnnnnnnnnnnnnnnnnnnnnnnnnnnnnnnnnnnnnnnnnnnnnnnnnnnnnnnnnnnnnnnnnnnnnnnnnnnnnnnnnnnnnnnnnnnnnnnnnnnnnnnnnnnnnnnnnnnnnnnnnnnnnnnnnnnnnnnnnnnnnnnnnnnnnnnnnnnnnnnnnnnnnnnnnnnnnnnnnnnnnnnnnnnnnnnnnnnnnnnnnnnnnnnnnnnnnnnnnnnnnnnnnnnnnnnnnnnnnnnnnnnnnnnnnnnnnnnnnnnnnnnnnnnnnnnnnnnnnnnnnnnnnnnnnnnnnnnnnnnnnnnnnnnnnnnnnnnnnnnnnnnnnnnnnnnnnnnnnnnnnnnnnnnnnnnnnnnnnnnnnnnnnnnnnnnnnnnnnnnnnnnnnnnnnnnnnnnnnnnnnnnnnnnnnnnnnnnnnnnnnnnnnnnnnnnnnnnnnnnnnnnnnnnnnnnnnnnnnnnnnnnnnnnnnnnnnnnnnnnnnnnnnnnnnnnnnnnnnnnnnnnnnnnnnnnnnnnnnnnnnnnnnnnnnnnnnnnnnnnnnnnnnnnnnnnnnnnnnnnnnnnnnnnnnnnnnnnnnnnnnnnnnnnnnnnnnnnnnnnnnnnnnnnnnnnnnnnnnnnnnnnnnnnnnnnnnnnnnnnnnnnnnnnnnnnnnnnnnnnnnnnnnnnnnnnnnnnnnnnnnnnnnnnnnnnnnnnnnnnnnnnnnnnnnnnnnnnnnnnnnnnnnnnnnnnnnnnnnnnnnnnnnnnnnnnnnnnnnnnnnnnnnnnnnnnnnnnnnnnnnnnnnnnnnnnnnnnnnnnnnnnnnnnnnnnnnnnnnnnnnnnnnnnnnnnnnnnnnnnnnnnnnnnnnnnnnnnnnnnnnnnnnnnnnnnnnnnnnnnnnnnnnnnnnnnnnnnnnnnnnnnnnnnnnnnnnnnnnnnnnnnnnnnnnnnnnnnnnnnnnnnnnnnnnnnnnnnnnnnnnnnnnnnnnnnnnnnnnnnnnnnnnnnnnnnnnnnnnnnnnnnnnnnnnnnnnnnnnnnnnnnnnnnnnnnnnnnnnnnnnnnnnnnnnnnnnnnnnnnnnnnnnnnnnnnnnnnnnnnnnnnnnnnnnnnnnnnnnnnnnnnnnnnnnnnnnnnnnnnnnnnnnnnnnnnnnnnnnnnnnnnnnnnnnnnnnnnnnnnnnnnnnnnnnnnnnnnnnnnnnnnnnnnnnnnnnnnnnnnnnnnnnnnnnnnnnnnnnnnnnnnnnnnnnnnnnnnnnnnnnnnnnnnnnnnnnnnnnnnnnnnnnnnnnnnnnnnnnnnnnnnnnnnnnnnnnnnnnnnnnnnnnnnnnnnnnnnnnnnnnnnnnnnnnnnnnnnnnnnnnnnnnnnnnnnnnnnnnnnnnnnnnnnnnnnnnnnnnnnnnnnnnnnnnnnnnnnnnnnnnnnnnnnnnnnnnnnnnnnnnnnnnnnnnnnnnnnnnnnnnnnnnnnnnnnnnnnnnnnnnnnnnnnnnnnnnnnnnnnnnnnnnnnnnnnnnnnnnnnnnnnnnnnnnnnnnnnnnnnnnnnnnnnnnnnnnnnnnnnnnnnnnnnnnnnnnnnnnnnnnnnnnnnnnnnnnnnnnnnnnnnnnnnnnnnnnnnnnnnnnnnnnnnnnnnnnnnnnnnnnnnnnnnnnnnnnnnnnnnnnnnnnnnnnnnnnnnnnnnnnnnnnnnnnnnnnnnnnnnnnnnnnnnnnnnnnnnnnnnnnnnnnnnnnnnnnnnnnnnnnnnnnnnnnnnnnnnnnnnnnnnnnnnnnnnnnnnnnnnnnnnnnnnnnnnnnnnnnnnnnnnnnnnnnnnnnnnnnnnnnnnnnnnnnnnnnnnnnnnnnnnnnnnnnnnnnnnnnnnnnnnnnnnnnnnnnnnnnnnnnnnnnnnnnnnnnnnnnnnnnnnnnnnnnnnnnnnnnnnnnnnnnnnnnnnnnnnnnnnnnnnnnnnnnnnnnnnnnnnnnnnnnnnnnnnnnnnnnnnnnnnnnnnnnnnnnnnnnnnnnnnnnnnnnnnnnnnnnnnnnnnnnnnnnnnnnnnnnnnnnnnnnnnnnnnnnnnnnnnnnnnnnnnnnnnnnnnnnnnnnnnnnnnnnnnnnnnnnnnnnnnnnnnnnnnnnnnnnnnnnnnnnnnnnnnnnnnnnnnnnnnnnnnnnnnnnnnnnnnnnnnnnnnnnnnnnnnnnnnnnnnnnnnnnnnnnnnnnnnnnnnnnnnnnnnnnnnnnnnnnnnnnnnnnnnnnnnnnnnnnnnnnnnnnnnnnnnnnnnnnnnnnnnnnnnnnnnnnnnnnnnnnnnnnnnnnnnnnnnnnnnnnnnnnnnnnnnnnnnnnnnnnnnnnnnnnnnnnnnnnnnnnnnnnnnnnnnnnnnnnnnnnnnnnnnnnnnnnnnnnnnnnnnnnnnnnnnnnnnnnnnnnnnnnnnnnnnnnnnnnnnnnnnnnnnnnnnnnnnnnnnnnnnnnnnnnnnnnnnnnnnnnnnnnnnnnnnnnnnnnnnnnnnnnnnnnnnnnnnnnnnnnnnnnnnnnnnnnnnnnnnnnnnnnnnnnnnnnnnnnnnnnnnnnnnnnnnnnnnnnnnnnnnnnnnnnnnnnnnnnnnnnnnnnnnnnnnnnnnnnnnnnnnnnnnnnnnnnnnnnnnnnnnnnnnnnnnnnnnnnnnnnnnnnnnnnnnnnnnnnnnnnnnnnnnnnnnnnnnnnnnnnnnnnnnnnnnnnnnnnnnnnnnnnnnnnnnnnnnnnnnnnnnnnnnnnnnnnnnnnnnnnnnnnnnnnnnnnnnnnnnnnnnnnnnnnnnnnnnnnnnnnnnnnnnnnnnnnnnnnnnnnnnnnnnnnnnnnnnnnnnnnnnnnnnnnnnnnnnnnnnnnnnnnnnnnnnnnnnnnnnnnnnnnnnnnnnnnnnnnnnnnnnnnnnnnnnnnnnnnnnnnnnnnnnnnnnnnnnnnnnnnnnnnnnnnnnnnnnnnnnnnnnnnnnnnnnnnnnnnnnnnnnnnnnnnnnnnnnnnnnnnnnnnnnnnnnnnnnnnnnnnnnnnnnnnnnnnnnnnnnnnnnnnnnnnnnnnnnnnnnnnnnnnnnnnnnnnnnnnnnnnnnnnnnnnnnnnnnnnnnnnnnnnnnnnnnnnnnnnnnnnnnnnnnnnnnnnnnnnnnnnnnnnnnnnnnnnnnnnnnnnnnnnnnnnnnnnnnnnnnnnnnnnnnnnnnnnnnnnnnnnnnnnnnnnnnnnnnnnnnnnnnnnnnnnnnnnnnnnnnnnnnnnnnnnnnnnnnnnnnnnnnnnnnnnnnnnnnnnnnnnnnnnnnnnnnnnnnnnnnnnnnnnnnnnnnnnnnnnnnnnnnnnnnnnnnnnnnnnnnnnnnnnnnnnnnnnnnnnnnnnnnnnnnnnnnnnnnnnnnnnnnnnnnnnnnnnnnnnnnnnnnnnnnnnnnnnnnnnnnnnnnnnnnnnnnnnnnnnnnnnnnnnnnnnnnnnnnnnnnnnnnnnnnnnnnnnnnnnnnnnnnnnnnnnnnnnnnnnnnnnnnnnnnnnnnnnnnnnnnnnnnnnnnnnnnnnnnnnnnnnnnnnnnnnnnnnnnnnnnnnnnnnnnnnnnnnnnnnnnnnnnnnnnnnnnnnnnnnnnnnnnnnnnnnnnnnnnnnnnnnnnnnnnnnnnnnnnnnnnnnnnnnnnnnnnnnnnnnnnnnnnnnnnnnnnnnnnnnnnnnnnnnnnnnnnnnnnnnnnnnnnnnnnnnnnnnnnnnnnnnnnnnnnnnnnnnnnnnnnnnnnnnnnnnnnnnnnnnnnnnnnnnnnnnnnnnnnnnnnnnnnnnnnnnnnnnnnnnnnnnnnnnnnnnnnnnnnnnnnnnnnnnnnnnnnnnnnnnnnnnnnnnnnnnnnnnnnnnnnnnnnnnnnnnnnnnnnnnnnnnnnnnnnnnnnnnnnnnnnnnnnnnnnnnnnnnnnnnnnnnnnnnnnnnnnnnnnnnnnnnnnnnnnnnnnnnnnnnnnnnnnnnnnnnnnnnnnnnnnnnnnnnnnnnnnnnnnnnnnnnnnnnnnnnnnnnnnnnnnnnnnnnnnnnnnnnnnnnnnnnnnnnnnnnnnnnnnnnnnnnnnnnnnnnnnnnnnnnnnnnnnnnnnnnnnnnnnnnnnnnnnnnnnnnnnnnnnnnnnnnnnnnnnnnnnnnnnnnnnnnnnnnnnnnnnnnnnnnnnnnnnnnnnnnnnnnnnnnnnnnnnnnnnnnnnnnnnnnnnnnnnnnnnnnnnnnnnnnnnnnnnnnnnnnnnnnnnnnnnnnnnnnnnnnnnnnnnnnnnnnnnnnnnnnnnnnnnnnnnnnnnnnnnnnnnnnnnnnnnnnnnnnnnnnnnnnnnnnnnnnnnnnnnnnnnnnnnnnnnnnnnnnnnnnnnnnnnnnnnnnnnnnnnnnnnnnnnnnnnnnnnnnnnnnnnnnnnnnnnnnnnnnnnnnnnnnnnnnnnnnnnnnnnnnnnnnnnnnnnnnnnnnnnnnnnnnnnnnnnnnnnnnnnnnnnnnnnnnnnnnnnnnnnnnnnnnnnnnnnnnnnnnnnnnnnnnnnnnnnnnnnnnnnnnnnnnnnnnnnnnnnnnnnnnnnnnnnnnnnnnnnnnnnnnnnnnnnnnnnnnnnnnnnnnnnnnnnnnnnnnnnnnnnnnnnnnnnnnnnnnnnnnnnnnnnnnnnnnnnnnnnnnnnnnnnnnnnnnnnnnnnnnnnnnnnnnnnnnnnnnnnnnnnnnnnnnnnnnnnnnnnnnnnnnnnnnnnnnnnnnnnnnnnnnnnnnnnnnnnnnnnnnnnnnnnnnnnnnnnnnnnnnnnnnnnnnnnnnnnnnnnnnnnnnnnnnnnnnnnnnnnnnnnnnnnnnnnnnnnnnnnnnnnnnnnnnnnnnnnnnnnnnnnnnnnnnnnnnnnnnnnnnnnnnnnnnnnnnnnnnnnnnnnnnnnnnnnnnnnnnnnnnnnnnnnnnnnnnnnnnnnnnnnnnnnnnnnnnnnnnnnnnnnnnnnnnnnnnnnnnnnnnnnnnnnnnnnnnnnnnnnnnnnnnnnnnnnnnnnnnnnnnnnnnnnnnnnnnnnnnnnnnnnnnnnnnnnnnnnnnnnnnnnnnnnnnnnnnnnnnnnnnnnnnnnnnnnnnnnnnnnnnnnnnnnnnnnnnnnnnnnnnnnnnnnnnnnnnnnnnnnnnnnnnnnnnnnnnnnnnnnnnnnnnnnnnnnnnnnnnnnnnnnnnnnnnnnnnnnnnnnnnnnnnnnnnnnnnnnnnnnnnnnnnnnnnnnnnnnnnnnnnnnnnnnnnnnnnnnnnnnnnnnnnnnnnnnnnnnnnnnnnnnnnnnnnnnnnnnnnnnnnnnnnnnnnnnnnnnnnnnnnnnnnnnnnnnnnnnnnnnnnnnnnnnnnnnnnnnnnnnnnnnnnnnnnnnnnnnnnnnnnnnnnnnnnnnnnnnnnnnnnnnnnnnnnnnnnnnnnnnnnnnnnnnnnnnnnnnnnnnnnnnnnnnnnnnnnnnnnnnnnnnnnnnnnnnnnnnnnnnnnnnnnnnnnnnnnnnnnnnnnnnnnnnnnnnnnnnnnnnnnnnnnnnnnnnnnnnnnnnnnnnnnnnnnnnnnnnnnnnnnnnnnnnnnnnnnnnnnnnnnnnnnnnnnnnnnnnnnnnnnnnnnnnnnnnnnnnnnnnnnnnnnnnnnnnnnnnnnnnnnnnnnnnnnnnnnnnnnnnnnnnnnnnnnnnnnnnnnnnnnnnnnnnnnnnnnnnnnnnnnnnnnnnnnnnnnnnnnnnnnnnnnnnnnnnnnnnnnnnnnnnnnnnnnnnnnnnnnnnnnnnnnnnnnnnnnnnnnnnnnnnnnnnnnnnnnnnnnnnnnnnnnnnnnnnnnnnnnnnnnnnnnnnnnnnnnnnnnnnnnnnnnnnnnnnnnnnnnnnnnnnnnnnnnnnnnnnnnnnnnnnnnnnnnnnnnnnnnnnnnnnnnnnnnnnnnnnnnnnnnnnnnnnnnnnnnnnnnnnnnnnnnnnnnnnnnnnnnnnnnnnnnnnnnnnnnnnnnnnnnnnnnnnnnnnnnnnnnnnnnnnnnnnnnnnnnnnnnnnnnnnnnnnnnnnnnnnnnnnnnnnnnnnnnnnnnnnnnnnnnnnnnnnnnnnnnnnnnnnnnnnnnnnnnnnnnnnnnnnnnnnnnnnnnnnnnnnnnnnnnnnnnnnnnnnnnnnnnnnnnnnnnnnnnnnnnnnnnnnnnnnnnnnnnnnnnnnnnnnnnnnnnnnnnnnnnnnnnnnnnnnnnnnnnnnnnnnnnnnnnnnnnnnnnnnnnnnnnnnnnnnnnnnnnnnnnnnnnnnnnnnnnnnnnnnnnnnnnnnnnnnnnnnnnnnnnnnnnnnnnnnnnnnnnnnnnnnnnnnnnnnnnnnnnnnnnnnnnnnnnnnnnnnnnnnnnnnnnnnnnnnnnnnnnnnnnnnnnnnnnnnnnnnnnnnnnnnnnnnnnnnnnnnnnnnnnnnnnnnnnnnnnnnnnnnnnnnnnnnnnnnnnnnnnnnnnnnnnnnnnnnnnnnnnnnnnnnnnnnnnnnnnnnnnnnnnnnnnnnnnnnnnnnnnnnnnnnnnnnnnnnnnnnnnnnnnnnnnnnnnnnnnnnnnnnnnnnnnnnnnnnnnnnnnnnnnnnnnnnnnnnnnnnnnnnnnnnnnnnnnnnnnnnnnnnnnnnnnnnnnnnnnnnnnnnnnnnnnnnnnnnnnnnnnnnnnnnnnnnnnnnnnnnnnnnnnnnnnnnnnnnnnnnnnnnnnnnnnnnnnnnnnnnnnnnnnnnnnnnnnnnnnnnnnnnnnnnnnnnnnnnnnnnnnnnnnnnnnnnnnnnnnnnnnnnnnnnnnnnnnnnnnnnnnnnnnnnnnnnnnnnnnnnnnnnnnnnnnnnnnnnnnnnnnnnnnnnnnnnnnnnnnnnnnnnnnnnnnnnnnnnnnnnnnnnnnnnnnnnnnnnnnnnnnnnnnnnnnnnnnnnnnnnnnnnnnnnnnnnnnnnnnnnnnnnnnnnnnnnnnnnnnnnnnnnnnnnnnnnnnnnnnnnnnnnnnnnnnnnnnnnnnnnnnnnnnnnnnnnnnnnnnnnnnnnnnnnnnnnnnnnnnnnnnnnnnnnnnnnnnnnnnnnnnnnnnnnnnnnnnnnnnnnnnnnnnnnnnnnnnnnnnnnnnnnnnnnnnnnnnnnnnnnnnnnnnnnnnnnnnnnnnnnnnnnnnnnnnnnnnnnnnnnnnnnnnnnnnnnnnnnnnnnnnnnnnnnnnnnnnnnnnnnnnnnnnnnnnnnnnnnnnnnnnnnnnnnnnnnnnnnnnnnnnnnnnnnnnnnnnnnnnnnnnnnnnnnnnnnnnnnnnnnnnnnnnnnnnnnnnnnnnnnnnnnnnnnnnnnnnnnnnnnnnnnnnnnnnnnnnnnnnnnnnnnnnnnnnnnnnnnnnnnnnnnnnnnnnnnnnnnnnnnnnnnnnnnnnnnnnnnnnnnnnnnnnnnnnnnnnnnnnnnnnnnnnnnnnnnnnnnnnnnnnnnnnnnnnnnnnnnnnnnnnnnnnnnnnnnnnnnnnnnnnnnnnnnnnnnnnnnnnnnnnnnnnnnnnnnnnnnnnnnnnnnnnnnnnnnnnnnnnnnnnnnnnnnnnnnnnnnnnnnnnnnnnnnnnnnnnnnnnnnnnnnnnnnnnnnnnnnnnnnnnnnnnnnnnnnnnnnnnnnnnnnnnnnnnnnnnnnnnnnnnnnnnnnnnnnnnnnnnnnnnnnnnnnnnnnnnnnnnnnnnnnnnnnnnnnnnnnnnnnnnnnnnnnnnnnnnnnnnnnnnnnnnnnnnnnnnnnnnnnnnnnnnnnnnnnnnnnnnnnnnnnnnnnnnnnnnnnnnnnnnnnnnnnnnnnnnnnnnnnnnnnnnnnnnnnnnnnnnnnnnnnnnnnnnnnnnnnnnnnnnnnnnnnnnnnnnnnnnnnnnnnnnnnnnnnnnnnnnnnnnnnnnnnnnnnnnnnnnnnnnnnnnnnnnnnnnnnnnnnnnnnnnnnnnnnnnnnnnnnnnnnnnnnnnnnnnnnnnnnnnnnnnnnnnnnnnnnnnnnnnnnnnnnnnnnnnnnnnnnnnnnnnnnnnnnnnnnnnnnnnnnnnnnnnnnnnnnnnnnnnnnnnnnnnnnnnnnnnnnnnnnnnnnnnnnnnnnnnnnnnnnnnnnnnnnnnnnnnnnnnnnnnnnnnnnnnnnnnnnnnnnnnnnnnnnnnnnnnnnnnnnnnnnnnnnnnnnnnnnnnnnnnnnnnnnnnnnnnnnnnnnnnnnnnnnnnnnnnnnnnnnnnnnnnnnnnnnnnnnnnnnnnnnnnnnnnnnnnnnnnnnnnnnnnnnnnnnnnnnnnnnnnnnnnnnnnnnnnnnnnnnnnnnnnnnnnnnnnnnnnnnnnnnnnnnnnnnnnnnnnnnnnnnnnnnnnnnnnnnnnnnnnnnnnnnnnnnnnnnnnnnnnnnnnnnnnnnnnnnnnnnnnnnnnnnnnnnnnnnnnnnnnnnnnnnnnnnnnnnnnnnnnnnnnnnnnnnnnnnnnnnnnnnnnnnnnnnnnnnnnnnnnnnnnnnnnnnnnnnnnnnnnnnnnnnnnnnnnnnnnnnnnnnnnnnnnnnnnnnnnnnnnnnnnnnnnnnnnnnnnnnnnnnnnnnnnnnnnnnnnnnnnnnnnnnnnnnnnnnnnnnnnnnnnnnnnnnnnnnnnnnnnnnnnnnnnnnnnnnnnnnnnnnnnnnnnnnnnnnnnnnnnnnnnnnnnnnnnnnnnnnnnnnnnnnnnnnnnnnnnnnnnnnnnnnnnnnnnnnnnnnnnnnnnnnnnnnnnnnnnnnnnnnnnnnnnnnnnnnnnnnnnnnnnnnnnnnnnnnnnnnnnnnnnnnnnnnnnnnnnnnnnnnnnnnnnnnnnnnnnnnnnnnnnnnnnnnnnnnnnnnnnnnnnnnnnnnnnnnnnnnnnnnnnnnnnnnnnnnnnnnnnnnnnnnnnnnnnnnnnnnnnnnnnnnnnnnnnnnnnnnnnnnnnnnnnnnnnnnnnnnnnnnnnnnnnnnnnnnnnnnnnnnnnnnnnnnnnnnnnnnnnnnnnnnnnnnnnnnnnnnnnnnnnnnnnnnnnnnnnnnnnnnnnnnnnnnnnnnnnnnnnnnnnnnnnnnnnnnnnnnnnnnnnnnnnnnnnnnnnnnnnnnnnnnnnnnnnnnnnnnnnnnnnnnnnnnnnnnnnnnnnnnnnnnnnnnnnnnnnnnnnnnnnnnnnnnnnnnnnnnnnnnnnnnnnnnnnnnnnnnnnnnnnnnnnnnnnnnnnnnnnnnnnnnnnnnnnnnnnnnnnnnnnnnnnnnnnnnnnnnnnnnnnnnnnnnnnnnnnnnnnnnnnnnnnnnnnnnnnnnnnnnnnnnnnnnnnnnnnnnnnnnnnnnnnnnnnnnnnnnnnnnnnnnnnnnnnnnnnnnnnnnnnnnnnnnnnnnnnnnnnnnnnnnnnnnnnnnnnnnnnnnnnnnnnnnnnnnnnnnnnnnnnnnnnnnnnnnnnnnnnnnnnnnnnnnnnnnnnnnnnnnnnnnnnnnnnnnnnnnnnnnnnnnnnnnnnnnnnnnnnnnnnnnnnnnnnnnnnnnnnnnnnnnnnnnnnnnnnnnnnnnnnnnnnnnnnnnnnnnnnnnnnnnnnnnnnnnnnnnnnnnnnnnnnnnnnnnnnnnnnnnnnnnnnnnnnnnnnnnnnnnnnnnnnnnnnnnnnnnnnnnnnnnnnnnnnnnnnnnnnnnnnnnnnnnnnnnnnnnnnnnnnnnnnnnnnnnnnnnnnnnnnnnnnnnnnnnnnnnnnnnnnnnnnnnnnnnnnnnnnnnnnnnnnnnnnnnnnnnnnnnnnnnnnnnnnnnnnnnnnnnnnnnnnnnnnnnnnnnnnnnnnnnnnnnnnnnnnnnnnnnnnnnnnnnnnnnnnnnnnnnnnnnnnnnnnnnnnnnnnnnnnnnnnnnnnnnnnnnnnnnnnnnnnnnnnnnnnnnnnnnnnnnnnnnnnnnnnnnnnnnnnnnnnnnnnnnnnnnnnnnnnnnnnnnnnnnnnnnnnnnnnnnnnnnnnnnnnnnnnnnnnnnnnnnnnnnnnnnnnnnnnnnnnnnnnnnnnnnnnnnnnnnnnnnnnnnnnnnnnnnnnnnnnnnnnnnnnnnnnnnnnnnnnnnnnnnnnnnnnnnnnnnnnnnnnnnnnnnnnnnnnnnnnnnnnnnnnnnnnnnnnnnnnnnnnnnnnnnnnnnnnnnnnnnnnnnnnnnnnnnnnnnnnnnnnnnnnnnnnnnnnnnnnnnnnnnnnnnnnnnnnnnnnnnnnnnnnnnnnnnnnnnnnnnnnnnnnnnnnnnnnnnnnnnnnnnnnnnnnnnnnnnnnnnnnnnnnnnnnnnnnnnnnnnnnnnnnnnnnnnnnnnnnnnnnnnnnnnnnnnnnnnnnnnnnnnnnnnnnnnnnnnnnnnnnnnnnnnnnnnnnnnnnnnnnnnnnnnnnnnnnnnnnnnnnnnnnnnnnnnnnnnnnnnnnnnnnnnnnnnnnnnnnnnnnnnnnnnnnnnnnnnnnnnnnnnnnnnnnnnnnnnnnnnnnnnnnnnnnnnnnnnnnnnnnnnnnnnnnnnnnnnnnnnnnnnnnnnnnnnnnnnnnnnnnnnnnnnnnnnnnnnnnnnnnnnnnnnnnnnnnnnnnnnnnnnnnnnnnnnnnnnnnnnnnnnnnnnnnnnnnnnnnnnnnnnnnnnnnnnnnnnnnnnnnnnnnnnnnnnnnnnnnnnnnnnnnnnnnnnnnnnnnnnnnnnnnnnnnnnnnnnnnnnnnnnnnnnnnnnnnnnnnnnnnnnnnnnnnnnnnnnnnnnnnnnnnnnnnnnnnnnnnnnnnnnnnnnnnnnnnnnnnnnnnnnnnnnnnnnnnnnnnnnnnnnnnnnnnnnnnnnnnnnnnnnnnnnnnnnnnnnnnnnnnnnnnnnnnnnnnnnnnnnnnnnnnnnnnnnnnnnnnnnnnnnnnnnnnnnnnnnnnnnnnnnnnnnnnnnnnnnnnnnnnnnnnnnnnnnnnnnnnnnnnnnnnnnnnnnnnnnnnnnnnnnnnnnnnnnnnnnnnnnnnnnnnnnnnnnnnnnnnnnnnnnnnnnnnnnnnnnnnnnnnnnnnnnnnnnnnnnnnnnnnnnnnnnnnnnnnnnnnnnnnnnnnnnnnnnnnnnnnnnnnnnnnnnnnnnnnnnnnnnnnnnnnnnnnnnnnnnnnnnnnnnnnnnnnnnnnnnnnnnnnnnnnnnnnnnnnnnnnnnnnnnnnnnnnnnnnnnnnnnnnnnnnnnnnnnnnnnnnnnnnnnnnnnnnnnnnnnnnnnnnnnnnnnnnnnnnnnnnnnnnnnnnnnnnnnnnnnnnnnnnnnnnnnnnnnnnnnnnnnnnnnnnnnnnnnnnnnnnnnnnnnnnnnnnnnnnnnnnnnnnnnnnnnnnnnnnnnnnnnnnnnnnnnnnnnnnnnnnnnnnnnnnnnnnnnnnnnnnnnnnnnnnnnnnnnnnnnnnnnnnnnnnnnnnnnnnnnnnnnnnnnnnnnnnnnnnnnnnnnnnnnnnnnnnnnnnnnnnnnnnnnnnnnnnnnnnnnnnnnnnnnnnnnnnnnnnnnnnnnnnnnnnnnnnnnnnnnnnnnnnnnnnnnnnnnnnnnnnnnnnnnnnnnnnnnnnnnnnnnnnnnnnnnnnnnnnnnnnnnnnnnnnnnnnnnnnnnnnnnnnnnnnnnnnnnnnnnnnnnnnnnnnnnnnnnnnnnnnnnnnnnnnnnnnnnnnnnnnnnnnnnnnnnnnnnnnnnnnnnnnnnnnnnnnnnnnnnnnnnnnnnnnnnnnnnnnnnnnnnnnnnnnnnnnnnnnnnnnnnnnnnnnnnnnnnnnnnnnnnnnnnnnnnnnnnnnnnnnnnnnnnnnnnnnnnnnnnnnnnnnnnnnnnnnnnnnnnnnnnnnnnnnnnnnnnnnnnnnnnnnnnnnnnnnnnnnnnnnnnnnnnnnnnnnnnnnnnnnnnnnnnnnnnnnnnnnnnnnnnnnnnnnnnnnnnnnnnnnnnnnnnnnnnnnnnnnnnnnnnnnnnnnnnnnnnnnnnnnnnnnnnnnnnnnnnnnnnnnnnnnnnnnnnnnnnnnnnnnnnnnnnnnnnnnnnnnnnnnnnnnnnnnnnnnnnnnnnnnnnnnnnnnnnnnnnnnnnnnnnnnnnnnnnnnnnnnnnnnnnnnnnnnnnnnnnnnnnnnnnnnnnnnnnnnnnnnnnnnnnnnnnnnnnnnnnnnnnnnnnnnnnnnnnnnnnnnnnnnnnnnnnnnnnnnnnnnnnnnnnnnnnnnnnnnnnnnnnnnnnnnnnnnnnnnnnnnnnnnnnnnnnnnnnnnnnnnnnnnnnnnnnnnnnnnnnnnnnnnnnnnnnnnnnnnnnnnnnnnnnnnnnnnnnnnnnnnnnnnnnnnnnnnnnnnnnnnnnnnnnnnnnnnnnnnnnnnnnnnnnnnnnnnnnnnnnnnnnnnnnnnnnnnnnnnnnnnnnnnnnnnnnnnnnnnnnnnnnnnnnnnnnnnnnnnnnnnnnnnnnnnnnnnnnnnnnnnnnnnnnnnnnnnnnnnnnnnnnnnnnnnnnnnnnnnnnnnnnnnnnnnnnnnnnnnnnnnnnnnnnnnnnnnnnnnnnnnnnnnnnnnnnnnnnnnnnnnnnnnnnnnnnnnnnnnnnnnnnnnnnnnnnnnnnnnnnnnnnnnnnnnnnnnnnnnnnnnnnnnnnnnnnnnnnnnnnnnnnnnnnnnnnnnnnnnnnnnnnnnnnnnnnnnnnnnnnnnnnnnnnnnnnnnnnnnnnnnnnnnnnnnnnnnnnnnnnnnnnnnnnnnnnnnnnnnnnnnnnnnnnnnnnnnnnnnnnnnnnnnnnnnnnnnnnnnnnnnnnnnnnnnnnnnnnnnnnnnnnnnnnnnnnnnnnnnnnnnnnnnnnnnnnnnnnnnnnnnnnnnnnnnnnnnnnnnnnnnnnnnnnnnnnnnnnnnnnnnnnnnnnnnnnnnnnnnnnnnnnnnnnnnnnnnnnnnnnnnnnnnnnnnnnnnnnnnnnnnnnnnnnnnnnnnnnnnnnnnnnnnnnnnnnnnnnnnnnnnnnnnnnnnnnnnnnnnnnnnnnnnnnnnnnnnnnnnnnnnnnnnnnnnnnnnnnnnnnnnnnnnnnnnnnnnnnnnnnnnnnnnnnnnnnnnnnnnnnnnnnnnnnnnnnnnnnnnnnnnnnnnnnnnnnnnnnnnnnnnnnnnnnnnnnnnnnnnnnnnnnnnnnnnnnnnnnnnnnnnnnnnnnnnnnnnnnnnnnnnnnnnnnnnnnnnnnnnnnnnnnnnnnnnnnnnnnnnnnnnnnnnnnnnnnnnnnnnnnnnnnnnnnnnnnnnnnnnnnnnnnnnnnnnnnnnnnnnnnnnnnnnnnnnnnnnnnnnnnnnnnnnnnnnnnnnnnnnnnnnnnnnnnnnnnnnnnnnnnnnnnnnnnnnnnnnnnnnnnnnnnnnnnnnnnnnnnnnnnnnnnnnnnnnnnnnnnnnnnnnnnnnnnnnnnnnnnnnnnnnnnnnnnnnnnnnnnnnnnnnnnnnnnnnnnnnnnnnnnnnnnnnnnnnnnnnnnnnnnnnnnnnnnnnnnnnnnnnnnnnnnnnnnnnnnnnnnnnnnnnnnnnnnnnnnnnnnnnnnnnnnnnnnnnnnnnnnnnnnnnnnnnnnnnnnnnnnnnnnnnnnnnnnnnnnnnnnnnnnnnnnnnnnnnnnnnnnnnnnnnnnnnnnnnnnnnnnnnnnnnnnnnnnnnnnnnnnnnnnnnnnnnnnnnnnnnnnnnnnnnnnnnnnnnnnnnnnnnnnnnnnnnnnnnnnnnnnnnnnnnnnnnnnnnnnnnnnnnnnnnnnnnnnnnnnnnnnnnnnnnnnnnnnnnnnnnnnnnnnnnnnnnnnnnnnnnnnnnnnnnnnnnnnnnnnnnnnnnnnnnnnnnnnnnnnnnnnnnnnnnnnnnnnnnnnnnnnnnnnnnnnnnnnnnnnnnnnnnnnnnnnnnnnnnnnnnnnnnnnnnnnnnnnnnnnnnnnnnnnnnnnnnnnnnnnnnnnnnnnnnnnnnnnnnnnnnnnnnnnnnnnnnnnnnnnnnnnnnnnnnnnnnnnnnnnnnnnnnnnnnnnnnnnnnnnnnnnnnnnnnnnnnnnnnnnnnnnnnnnnnnnnnnnnnnnnnnnnnnnnnnnnnnnnnnnnnnnnnnnnnnnnnnnnnnnnnnnnnnnnnnnnnnnnnnnnnnnnnnnnnnnnnnnnnnnnnnnnnnnnnnnnnnnnnnnnnnnnnnnnnnnnnnnnnnnnnnnnnnnnnnnnnnnnnnnnnnnnnnnnnnnnnnnnnnnnnnnnnnnnnnnnnnnnnnnnnnnnnnnnnnnnnnnnnnnnnnnnnnnnnnnnnnnnnnnnnnnnnnnnnnnnnnnnnnnnnnnnnnnnnnnnnnnnnnnnnnnnnnnnnnnnnnnnnnnnnnnnnnnnnnnnnnnnnnnnnnnnnnnnnnnnnnnnnnnnnnnnnnnnnnnnnnnnnnnnnnnnnnnnnnnnnnnnnnnnnnnnnnnnnnnnnnnnnnnnnnnnnnnnnnnnnnnnnnnnnnnnnnnnnnnnnnnnnnnnnnnnnnnnnnnnnnnnnnnnnnnnnnnnnnnnnnnnnnnnnnnnnnnnnnnnnnnnnnnnnnnnnnnnnnnnnnnnnnnnnnnnnnnnnnnnnnnnnnnnnnnnnnnnnnnnnnnnnnnnnnnnnnnnnnnnnnnnnnnnnnnnnnnnnnnnnnnnnnnnnnnnnnnnnnnnnnnnnnnnnnnnnnnnnnnnnnnnnnnnnnnnnnnnnnnnnnnnnnnnnnnnnnnnnnnnnnnnnnnnnnnnnnnnnnnnnnnnnnnnnnnnnnnnnnnnnnnnnnnnnnnnnnnnnnnnnnnnnnnnnnnnnnnnnnnnnnnnnnnnnnnnnnnnnnnnnnnnnnnnnnnnnnnnnnnnnnnnnnnnnnnnnnnnnnnnnnnnnnnnnnnnnnnnnnnnnnnnnnnnnnnnnnnnnnnnnnnnnnnnnnnnnnnnnnnnnnnnnnnnnnnnnnnnnnnnnnnnnnnnnnnnnnnnnnnnnnnnnnnnnnnnnnnnnnnnnnnnnnnnnnnnnnnnnnnnnnnnnnnnnnnnnnnnnnnnnnnnnnnnnnnnnnnnnnnnnnnnnnnnnnnnnnnnnnnnnnnnnnnnnnnnnnnnnnnnnnnnnnnnnnnnnnnnnnnnnnnnnnnnnnnnnnnnnnnnnnnnnnnnnnnnnnnnnnnnnnnnnnnnnnnnnnnnnnnnnnnnnnnnnnnnnnnnnnnnnnnnnnnnnnnnnnnnnnnnnnnnnnnnnnnnnnnnnnnnnnnnnnnnnnnnnnnnnnnnnnnnnnnnnnnnnnnnnnnnnnnnnnnnnnnnnnnnnnnnnnnnnnnnnnnnnnnnnnnnnnnnnnnnnnnnnnnnnnnnnnnnnnnnnnnnnnnnnnnnnnnnnnnnnnnnnnnnnnnnnnnnnnnnnnnnnnnnnnnnnnnnnnnnnnnnnnnnnnnnnnnnnnnnnnnnnnnnnnnnnnnnnnnnnnnnnnnnnnnnnnnnnnnnnnnnnnnnnnnnnnnnnnnnnnnnnnnnnnnnnnnnnnnnnnnnnnnnnnnnnnnnnnnnnnnnnnnnnnnnnnnnnnnnnnnnnnnnnnnnnnnnnnnnnnnnnnnnnnnnnnnnnnnnnnnnnnnnnnnnnnnnnnnnnnnnnnnnnnnnnnnnnnnnnnnnnnnnnnnnnnnnnnnnnnnnnnnnnnnnnnnnnnnnnnnnnnnnnnnnnnnnnnnnnnnnnnnnnnnnnnnnnnnnnnnnnnnnnnnnnnnnnnnnnnnnnnnnnnnnnnnnnnnnnnnnnnnnnnnnnnnnnnnnnnnnnnnnnnnnnnnnnnnnnnnnnnnnnnnnnnnnnnnnnnnnnnnnnnnnnnnnnnnnnnnnnnnnnnnnnnnnnnnnnnnnnnnnnnnnnnnnnnnnnnnnnnnnnnnnnnnnnnnnnnnnnnnnnnnnnnnnnnnnnnnnnnnnnnnnnnnnnnnnnnnnnnnnnnnnnnnnnnnnnnnnnnnnnnnnnnnnnnnnnnnnnnnnnnnnnnnnnnnnnnnnnnnnnnnnnnnnnnnnnnnnnnnnnnnnnnnnnnnnnnnnnnnnnnnnnnnnnnnnnnnnnnnnnnnnnnnnnnnnnnnnnnnnnnnnnnnnnnnnnnnnnnnnnnnnnnnnnnnnnnnnnnnnnnnnnnnnnnnnnnnnnnnnnnnnnnnnnnnnnnnnnnnnnnnnnnnnnnnnnnnnnnnnnnnnnnnnnnnnnnnnnnnnnnnnnnnnnnnnnnnnnnnnnnnnnnnnnnnnnnnnnnnnnnnnnnnnnnnnnnnnnnnnnnnnnnnnnnnnnnnnnnnnnnnnnnnnnnnnnnnnnnnnnnnnnnnnnnnnnnnnnnnnnnnnnnnnnnnnnnnnnnnnnnnnnnnnnnnnnnnnnnnnnnnnnnnnnnnnnnnnnnnnnnnnnnnnnnnnnnnnnnnnnnnnnnnnnnnnnnnnnnnnnnnnnnnnnnnnnnnnnnnnnnnnnnnnnnnnnnnnnnnnnnnnnnnnnnnnnnnnnnnnnnnnnnnnnnnnnnnnnnnnnnnnnnnnnnnnnnnnnnnnnnnnnnnnnnnnnnnnnnnnnnnnnnnnnnnnnnnnnnnnnnnnnnnnnnnnnnnnnnnnnnnnnnnnnnnnnnnnnnnnnnnnnnnnnnnnnnnnnnnnnnnnnnnnnnnnnnnnnnnnnnnnnnnnnnnnnnnnnnnnnnnnnnnnnnnnnnnnnnnnnnnnnnnnnnnnnnnnnnnnnnnnnnnnnnnnnnnnnnnnnnnnnnnnnnnnnnnnnnnnnnnnnnnnnnnnnnnnnnnnnnnnnnnnnnnnnnnnnnnnnnnnnnnnnnnnnnnnnnnnnnnnnnnnnnnnnnnnnnnnnnnnnnnnnnnnnnnnnnnnnnnnnnnnnnnnnnnnnnnnnnnnnnnnnnnnnnnnnnnnnnnnnnnnnnnnnnnnnnnnnnnnnnnnnnnnnnnnnnnnnnnnnnnnnnnnnnnnnnnnnnnnnnnnnnnnnnnnnnnnnnnnnnnnnnnnnnnnnnnnnnnnnnnnnnnnnnnnnnnnnnnnnnnnnnnnnnnnnnnnnnnnnnnnnnnnnnnnnnnnnnnnnnnnnnnnnnnnnnnnnnnnnnnnnnnnnnnnnnnnnnnnnnnnnnnnnnnnnnnnnnnnnnnnnnnnnnnnnnnnnnnnnnnnnnnnnnnnnnnnnnnnnnnnnnnnnnnnnnnnnnnnnnnnnnnnnnnnnnnnnnnnnnnnnnnnnnnnnnnnnnnnnnnnnnnnnnnnnnnnnnnnnnnnnnnnnnnnnnnnnnnnnnnnnnnnnnnnnnnnnnnnnnnnnnnnnnnnnnnnnnnnnnnnnnnnnnnnnnnnnnnnnnnnnnnnnnnnnnnnnnnnnnnnnnnnnnnnnnnnnnnnnnnnnnnnnnnnnnnnnnnnnnnnnnnnnnnnnnnnnnnnnnnnnnnnnnnnnnnnnnnnnnnnnnnnnnnnnnnnnnnnnnnnnnnnnnnnnnnnnnnnnnnnnnnnnnnnnnnnnnnnnnnnnnnnnnnnnnnnnnnnnnnnnnnnnnnnnnnnnnnnnnnnnnnnnnnnnnnnnnnnnnnnnnnnnnnnnnnnnnnnnnnnnnnnnnnnnnnnnnnnnnnnnnnnnnnnnnnnnnnnnnnnnnnnnnnnnnnnnnnnnnnnnnnnnnnnnnnnnnnnnnnnnnnnnnnnnnnnnnnnnnnnnnnnnnnnnnnnnnnnnnnnnnnnnnnnnnnnnnnnnnnnnnnnnnnnnnnnnnnnnnnnnnnnnnnnnnnnnnnnnnnnnnnnnnnnnnnnnnnnnnnnnnnnnnnnnnnnnnnnnnnnnnnnnnnnnnnnnnnnnnnnnnnnnnnnnnnnnnnnnnnnnnnnnnnnnnnnnnnnnnnnnnnnnnnnnnnnnnnnnnnnnnnnnnnnnnnnnnnnnnnnnnnnnnnnnnnnnnnnnnnnnnnnnnnnnnnnnnnnnnnnnnnnnnnnnnnnnnnnnnnnnnnnnnnnnnnnnnnnnnnnnnnnnnnnnnnnnnnnnnnnnnnnnnnnnnnnnnnnnnnnnnnnnnnnnnnnnnnnnnnnnnnnnnnnnnnnnnnnnnnnnnnnnnnnnnnnnnnnnnnnnnnnnnnnnnnnnnnnnnnnnnnnnnnnnnnnnnnnnnnnnnnnnnnnnnnnnnnnnnnnnnnnnnnnnnnnnnnnnnnnnnnnnnnnnnnnnnnnnnnnnnnnnnnnnnnnnnnnnnnnnnnnnnnnnnnnnnnnnnnnnnnnnnnnnnnnnnnnnnnnnnnnnnnnnnnnnnnnnnnnnnnnnnnnnnnnnnnnnnnnnnnnnnnnnnnnnnnnnnnnnnnnnnnnnnnnnnnnnnnnnnnnnnnnnnnnnnnnnnnnnnnnnnnnnnnnnnnnnnnnnnnnnnnnnnnnnnnnnnnnnnnnnnnnnnnnnnnnnnnnnnnnnnnnnnnnnnnnnnnnnnnnnnnnnnnnnnnnnnnnnnnnnnnnnnnnnnnnnnnnnnnnnnnnnnnnnnnnnnnnnnnnnnnnnnnnnnnnnnnnnnnnnnnnnnnnnnnnnnnnnnnnnnnnnnnnnnnnnnnnnnnnnnnnnnnnnnnnnnnnnnnnnnnnnnnnnnnnnnnnnnnnnnnnnnnnnnnnnnnnnnnnnnnnnnnnnnnnnnnnnnnnnnnnnnnnnnnnnnnnnnnnnnnnnnnnnnnnnnnnnnnnnnnnnnnnnnnnnnnnnnnnnnnnnnnnnnnnnnnnnnnnnnnnnnnnnnnnnnnnnnnnnnnnnnnnnnnnnnnnnnnnnnnnnnnnnnnnnnnnnnnnnnnnnnnnnnnnnnnnnnnnnnnnnnnnnnnnnnnnnnnnnnnnnnnnnnnnnnnnnnnnnnnnnnnnnnnnnnnnnnnnnnnnnnnnnnnnnnnnnnnnnnnnnnnnnnnnnnnnnnnnnnnnnnnnnnnnnnnnnnnnnnnnnnnnnnnnnnnnnnnnnnnnnnnnnnnnnnnnnnnnnnnnnnnnnnnnnnnnnnnnnnnnnnnnnnnnnnnnnnnnnnnnnnnnnnnnnnnnnnnnnnnnnnnnnnnnnnnnnnnnnnnnnnnnnnnnnnnnnnnnnnnnnnnnnnnnnnnnnnnnnnnnnnnnnnnnnnnnnnnnnnnnnnnnnnnnnnnnnnnnnnnnnnnnnnnnnnnnnnnnnnnnnnnnnnnnnnnnnnnnnnnnnnnnnnnnnnnnnnnnnnnnnnnnnnnnnnnnnnnnnnnnnnnnnnnnnnnnnnnnnnnnnnnnnnnnnnnnnnnnnnnnnnnnnnnnnnnnnnnnnnnnnnnnnnnnnnnnnnnnnnnnnnnnnnnnnnnnnnnnnnnnnnnnnnnnnnnnnnnnnnnnnnnnnnnnnnnnnnnnnnnnnnnnnnnnnnnnnnnnnnnnnnnnnnnnnnnnnnnnnnnnnnnnnnnnnnnnnnnnnnnnnnnnnnnnnnnnnnnnnnnnnnnnnnnnnnnnnnnnnnnnnnnnnnnnnnnnnnnnnnnnnnnnnnnnnnnnnnnnnnnnnnnnnnnnnnnnnnnnnnnnnnnnnnnnnnnnnnnnnnnnnnnnnnnnnnnnnnnnnnnnnnnnnnnnnnnnnnnnnnnnnnnnnnnnnnnnnnnnnnnnnnnnnnnnnnnnnnnnnnnnnnnnnnnnnnnnnnnnnnnnnnnnnnnnnnnnnnnnnnnnnnnnnnnnnnnnnnnnnnnnnnnnnnnnnnnnnnnnnnnnnnnnnnnnnnnnnnnnnnnnnnnnnnnnnnnnnnnnnnnnnnnnnnnnnnnnnnnnnnnnnnnnnnnnnnnnnnnnnnnnnnnnnnnnnnnnnnnnnnnnnnnnnnnnnnnnnnnnnnnnnnnnnnnnnnnnnnnnnnnnnnnnnnnnnnnnnnnnnnnnnnnnnnnnnnnnnnnnnnnnnnnnnnnnnnnnnnnnnnnnnnnnnnnnnnnnnnnnnnnnnnnnnnnnnnnnnnnnnnnnnnnnnnnnnnnnnnnnnnnnnnnnnnnnnnnnnnnnnnnnnnnnnnnnnnnnnnnnnnnnnnnnnnnnnnnnnnnnnnnnnnnnnnnnnnnnnnnnnnnnnnnnnnnnnnnnnnnnnnnnnnnnnnnnnnnnnnnnnnnnnnnnnnnnnnnnnnnnnnnnnnnnnnnnnnnnnnnnnnnnnnnnnnnnnnnnnnnnnnnnnnnnnnnnnnnnnnnnnnnnnnnnnnnnnnnnnnnnnnnnnnnnnnnnnnnnnnnnnnnnnnnnnnnnnnnnnnnnnnnnnnnnnnnnnnnnnnnnnnnnnnnnnnnnnnnnnnnnnnnnnnnnnnnnnnnnnnnnnnnnnnnnnnnnnnnnnnnnnnnnnnnnnnnnnnnnnnnnnnnnnnnnnnnnnnnnnnnnnnnnnnnnnnnnnnnnnnnnnnnnnnnnnnnnnnnnnnnnnnnnnnnnnnnnnnnnnnnnnnnnnnnnnnnnnnnnnnnnnnnnnnnnnnnnnnnnnnnnnnnnnnnnnnnnnnnnnnnnnnnnnnnnnnnnnnnnnnnnnnnnnnnnnnnnnnnnnnnnnnnnnnnnnnnnnnnnnnnnnnnnnnnnnnnnnnnnnnnnnnnnnnnnnnnnnnnnnnnnnnnnnnnnnnnnnnnnnnnnnnnnnnnnnnnnnnnnnnnnnnnnnnnnnnnnnnnnnnnnnnnnnnnnnnnnnnnnnnnnnnnnnnnnnnnnnnnnnnnnnnnnnnnnnnnnnnnnnnnnnnnnnnnnnnnnnnnnnnnnnnnnnnnnnnnnnnnnnnnnnnnnnnnnnnnnnnnnnnnnnnnnnnnnnnnnnnnnnnnnnnnnnnnnnnnnnnnnnnnnnnnnnnnnnnnnnnnnnnnnnnnnnnnnnnnnnnnnnnnnnnnnnnnnnnnnnnnnnnnnnnnnnnnnnnnnnnnnnnnnnnnnnnnnnnnnnnnnnnnnnnnnnnnnnnnnnnnnnnnnnnnnnnnnnnnnnnnnnnnnnnnnnnnnnnnnnnnnnnnnnnnnnnnnnnnnnnnnnnnnnnnnnnnnnnnnnnnnnnnnnnnnnnnnnnnnnnnnnnnnnnnnnnnnnnnnnnnnnnnnnnnnnnnnnnnnnnnnnnnnnnnnnnnnnnnnnnnnnnnnnnnnnnnnnnnnnnnnnnnnnnnnnnnnnnnnnnnnnnnnnnnnnnnnnnnnnnnnnnnnnnnnnnnnnnnnnnnnnnnnnnnnnnnnnnnnnnnnnnnnnnnnnnnnnnnnnnnnnnnnnnnnnnnnnnnnnnnnnnnnnnnnnnnnnnnnnnnnnnnnnnnnnnnnnnnnnnnnnnnnnnnnnnnnnnnnnnnnnnnnnnnnnnnnnnnnnnnnnnnnnnnnnnnnnnnnnnnnnnnnnnnnnnnnnnnnnnnnnnnnnnnnnnnnnnnnnnnnnnnnnnnnnnnnnnnnnnnnnnnnnnnnnnnnnnnnnnnnnnnnnnnnnnnnnnnnnnnnnnnnnnnnnnnnnnnnnnnnnnnnnnnnnnnnnnnnnnnnnnnnnnnnnnnnnnnnnnnnnnnnnnnnnnnnnnnnnnnnnnnnnnnnnnnnnnnnnnnnnnnnnnnnnnnnnnnnnnnnnnnnnnnnnnnnnnnnnnnnnnnnnnnnnnnnnnnnnnnnnnnnnnnnnnnnnnnnnnnnnnnnnnnnnnnnnnnnnnnnnnnnnnnnnnnnnnnnnnnnnnnnnnnnnnnnnnnnnnnnnnnnnnnnnnnnnnnnnnnnnnnnnnnnnnnnnnnnnnnnnnnnnnnnnnnnnnnnnnnnnnnnnnnnnnnnnnnnnnnnnnnnnnnnnnnnnnnnnnnnnnnnnnnnnnnnnnnnnnnnnnnnnnnnnnnnnnnnnnnnnnnnnnnnnnnnnnnnnnnnnnnnnnnnnnnnnnnnnnnnnnnnnnnnnnnnnnnnnnnnnnnnnnnnnnnnnnnnnnnnnnnnnnnnnnnnnnnnnnnnnnnnnnnnnnnnnnnnnnnnnnnnnnnnnnnnnnnnnnnnnnnnnnnnnnnnnnnnnnnnnnnnnnnnnnnnnnnnnnnnnnnnnnnnnnnnnnnnnnnnnnnnnnnnnnnnnnnnnnnnnnnnnnnnnnnnnnnnnnnnnnnnnnnnnnnnnnnnnnnnnnnnnnnnnnnnnnnnnnnnnnnnnnnnnnnnnnnnnnnnnnnnnnnnnnnnnnnnnnnnnnnnnnnnnnnnnnnnnnnnnnnnnnnnnnnnnnnnnnnnnnnnnnnnnnnnnnnnnnnnnnnnnnnnnnnnnnnnnnnnnnnnnnnnnnnnnnnnnnnnnnnnnnnnnnnnnnnnnnnnnnnnnnnnnnnnnnnnnnnnnnnnnnnnnnnnnnnnnnnnnnnnnnnnnnnnnnnnnnnnnnnnnnnnnnnnnnnnnnnnnnnnnnnnnnnnnnnnnnnnnnnnnnnnnnnnnnnnnnnnnnnnnnnnnnnnnnnnnnnnnnnnnnnnnnnnnnnnnnnnnnnnnnnnnnnnnnnnnnnnnnnnnnnnnnnnnnnnnnnnnnnnnnnnnnnnnnnnnnnnnnnnnnnnnnnnnnnnnnnnnnnnnnnnnnnnnnnnnnnnnnnnnnnnnnnnnnnnnnnnnnnnnnnnnnnnnnnnnnnnnnnnnnnnnnnnnnnnnnnnnnnnnnnnnnnnnnnnnnnnnnnnnnnnnnnnnnnnnnnnnnnnnnnnnnnnnnnnnnnnnnnnnnnnnnnnnnnnnnnnnnnnnnnnnnnnnnnnnnnnnnnnnnnnnnnnnnnnnnnnnnnnnnnnnnnnnnnnnnnnnnnnnnnnnnnnnnnnnnnnnnnnnnnnnnnnnnnnnnnnnnnnnnnnnnnnnnnnnnnnnnnnnnnnnnnnnnnnnnnnnnnnnnnnnnnnnnnnnnnnnnnnnnnnnnnnnnnnnnnnnnnnnnnnnnnnnnnnnnnnnnnnnnnnnnnnnnnnnnnnnnnnnnnnnnnnnnnnnnnnnnnnnnnnnnnnnnnnnnnnnnnnnnnnnnnnnnnnnnnnnnnnnnnnnnnnnnnnnnnnnnnnnnnnnnnnnnnnnnnnnnnnnnnnnnnnnnnnnnnnnnnnnnnnnnnnnnnnnnnnnnnnnnnnnnnnnnnnnnnnnnnnnnnnnnnnnnnnnnnnnnnnnnnnnnnnnnnnnnnnnnnnnnnnnnnnnnnnnnnnnnnnnnnnnnnnnnnnnnnnnnnnnnnnnnnnnnnnnnnnnnnnnnnnnnnnnnnnnnnnnnnnnnnnnnnnnnnnnnnnnnnnnnnnnnnnnnnnnnnnnnnnnnnnnnnnnnnnnnnnnnnnnnnnnnnnnnnnnnnnnnnnnnnnnnnnnnnnnnnnnnnnnnnnnnnnnnnnnnnnnnnnnnnnnnnnnnnnnnnnnnnnnnnnnnnnnnnnnnnnnnnnnnnnnnnnnnnnnnnnnnnnnnnnnnnnnnnnnnnnnnnnnnnnnnnnnnnnnnnnnnnnnnnnnnnnnnnnnnnnnnnnnnnnnnnnnnnnnnnnnnnnnnnnnnnnnnnnnnnnnnnnnnnnnnnnnnnnnnnnnnnnnnnnnnnnnnnnnnnnnnnnnnnnnnnnnnnnnnnnnnnnnnnnnnnnnnnnnnnnnnnnnnnnnnnnnnnnnnnnnnnnnnnnnnnnnnnnnnnnnnnnnnnnnnnnnnnnnnnnnnnnnnnnnnnnnnnnnnnnnnnnnnnnnnnnnnnnnnnnnnnnnnnnnnnnnnnnnnnnnnnnnnnnnnnnnnnnnnnnnnnnnnnnnnnnnnnnnnnnnnnnnnnnnnnnnnnnnnnnnnnnnnnnnnnnnnnnnnnnnnnnnnnnnnnnnnnnnnnnnnnnnnnnnnnnnnnnnnnnnnnnnnnnnnnnnnnnnnnnnnnnnnnnnnnnnnnnnnnnnnnnnnnnnnnnnnnnnnnnnnnnnnnnnnnnnnnnnnnnnnnnnnnnnnnnnnnnnnnnnnnnnnnnnnnnnnnnnnnnnnnnnnnnnnnnnnnnnnnnnnnnnnnnnnnnnnnnnnnnnnnnnnnnnnnnnnnnnnnnnnnnnnnnnnnnnnnnnnnnnnnnnnnnnnnnnnnnnnnnnnnnnnnnnnnnnnnnnnnnnnnnnnnnnnnnnnnnnnnnnnnnnnnnnnnnnnnnnnnnnnnnnnnnnnnnnnnnnnnnnnnnnnnnnnnnnnnnnnnnnnnnnnnnnnnnnnnnnnnnnnnnnnnnnnnnnnnnnnnnnnnnnnnnnnnnnnnnnnnnnnnnnnnnnnnnnnnnnnnnnnnnnnnnnnnnnnnnnnnnnnnnnnnnnnnnnnnnnnnnnnnnnnnnnnnnnnnnnnnnnnnnnnnnnnnnnnnnnnnnnnnnnnnnnnnnnnnnnnnnnnnnnnnnnnnnnnnnnnnnnnnnnnnnnnnnnnnnnnnnnnnnnnnnnnnnnnnnnnnnnnnnnnnnnnnnnnnnnnnnnnnnnnnnnnnnnnnnnnnnnnnnnnnnnnnnnnnnnnnnnnnnnnnnnnnnnnnnnnnnnnnnnnnnnnnnnnnnnnnnnnnnnnnnnnnnnnnnnnnnnnnnnnnnnnnnnnnnnnnnnnnnnnnnnnnnnnnnnnnnnnnnnnnnnnnnnnnnnnnnnnnnnnnnnnnnnnnnnnnnnnnnnnnnnnnnnnnnnnnnnnnnnnnnnnnnnnnnnnnnnnnnnnnnnnnnnnnnnnnnnnnnnnnnnnnnnnnnnnnnnnnnnnnnnnnnnnnnnnnnnnnnnnnnnnnnnnnnnnnnnnnnnnnnnnnnnnnnnnnnnnnnnnnnnnnnnnnnnnnnnnnnnnnnnnnnnnnnnnnnnnnnnnnnnnnnnnnnnnnnnnnnnnnnnnnnnnnnnnnnnnnnnnnnnnnnnnnnnnnnnnnnnnnnnnnnnnnnnnnnnnnnnnnnnnnnnnnnnnnnnnnnnnnnnnnnnnnnnnnnnnnnnnnnnnnnnnnnnnnnnnnnnnnnnnnnnnnnnnnnnnnnnnnnnnnnnnnnnnnnnnnnnnnnnnnnnnnnnnnnnnnnnnnnnnnnnnnnnnnnnnnnnnnnnnnnnnnnnnnnnnnnnnnnnnnnnnnnnnnnnnnnnnnnnnnnnnnnnnnnnnnnnnnnnnnnnnnnnnnnnnnnnnnnnnnnnnnnnnnnnnnnnnnnnnnnnnnnnnnnnnnnnnnnnnnnnnnnnnnnnnnnnnnnnnnnnnnnnnnnnnnnnnnnnnnnnnnnnnnnnnnnnnnnnnnnnnnnnnnnnnnnnnnnnnnnnnnnnnnnnnnnnnnnnnnnnnnnnnnnnnnnnnnnnnnnnnnnnnnnnnnnnnnnnnnnnnnnnnnnnnnnnnnnnnnnnnnnnnnnnnnnnnnnnnnnnnnnnnnnnnnnnnnnnnnnnnnnnnnnnnnnnnnnnnnnnnnnnnnnnnnnnnnnnnnnnnnnnnnnnnnnnnnnnnnnnnnnnnnnnnnnnnnnnnnnnnnnnnnnnnnnnnnnnnnnnnnnnnnnnnnnnnnnnnnnnnnnnnnnnnnnnnnnnnnnnnnnnnnnnnnnnnnnnnnnnnnnnnnnnnnnnnnnnnnnnnnnnnnnnnnnnnnnnnnnnnnnnnnnnnnnnnnnnnnnnnnnnnnnnnnnnnnnnnnnnnnnnnnnnnnnnnnnnnnnnnnnnnnnnnnnnnnnnnnnnnnnnnnnnnnnnnnnnnnnnnnnnnnnnnnnnnnnnnnnnnnnnnnnnnnnnnnnnnnnnnnnnnnnnnnnnnnnnnnnnnnnnnnnnnnnnnnnnnnnnnnnnnnnnnnnnnnnnnnnnnnnnnnnnnnnnnnnnnnnnnnnnnnnnnnnnnnnnnnnnnnnnnnnnnnnnnnnnnnnnnnnnnnnnnnnnnnnnnnnnnnnnnnnnnnnnnnnnnnnnnnnnnnnnnnnnnnnnnnnnnnnnnnnnnnnnnnnnnnnnnnnnnnnnnnnnnnnnnnnnnnnnnnnnnnnnnnnnnnnnnnnnnnnnnnnnnnnnnnnnnnnnnnnnnnnnnnnnnnnnnnnnnnnnnnnnnnnnnnnnnnnnnnnnnnnnnnnnnnnnnnnnnnnnnnnnnnnnnnnnnnnnnnnnnnnnnnnnnnnnnnnnnnnnnnnnnnnnnnnnnnnnnnnnnnnnnnnnnnnnnnnnnnnnnnnnnnnnnnnnnnnnnnnnnnnnnnnnnnnnnnnnnnnnnnnnnnnnnnnnnnnnnnnnnnnnnnnnnnnnnnnnnnnnnnnnnnnnnnnnnnnnnnnnnnnnnnnnnnnnnnnnnnnnnnnnnnnnnnnnnnnnnnnnnnnnnnnnnnnnnnnnnnnnnnnnnnnnnnnnnnnnnnnnnnnnnnnnnnnnnnnnnnnnnnnnnnnnnnnnnnnnnnnnnnnnnnnnnnnnnnnnnnnnnnnnnnnnnnnnnnnnnnnnnnnnnnnnnnnnnnnnnnnnnnnnnnnnnnnnnnnnnnnnnnnnnnnnnnnnnnnnnnnnnnnnnnnnnnnnnnnnnnnnnnnnnnnnnnnnnnnnnnnnnnnnnnnnnnnnnnnnnnnnnnnnnnnnnnnnnnnnnnnnnnnnnnnnnnnnnnnnnnnnnnnnnnnnnnnnnnnnnnnnnnnnnnnnnnnnnnnnnnnnnnnnnnnnnnnnnnnnnnnnnnnnnnnnnnnnnnnnnnnnnnnnnnnnnnnnnnnnnnnnnnnnnnnnnnnnnnnnnnnnnnnnnnnnnnnnnnnnnnnnnnnnnnnnnnnnnnnnnnnnnnnnnnnnnnnnnnnnnnnnnnnnnnnnnnnnnnnnnnnnnnnnnnnnnnnnnnnnnnnnnnnnnnnnnnnnnnnnnnnnnnnnnnnnnnnnnnnnnnnnnnnnnnnnnnnnnnnnnnnnnnnnnnnnnnnnnnnnnnnnnnnnnnnnnnnnnnnnnnnnnnnnnnnnnnnnnnnnnnnnnnnnnnnnnnnnnnnnnnnnnnnnnnnnnnnnnnnnnnnnnnnnnnnnnnnnnnnnnnnnnnnnnnnnnnnnnnnnnnnnnnnnnnnnnnnnnnnnnnnnnnnnnnnnnnnnnnnnnnnnnnnnnnnnnnnnnnnnnnnnnnnnnnnnnnnnnnnnnnnnnnnnnnnnnnnnnnnnnnnnnnnnnnnnnnnnnnnnnnnnnnnnnnnnnnnnnnnnnnnnnnnnnnnnnnnnnnnnnnnnnnnnnnnnnnnnnnnnnnnnnnnnnnnnnnnnnnnnnnnnnnnnnnnnnnnnnnnnnnnnnnnnnnnnnnnnnnnnnnnnnnnnnnnnnnnnnnnnnnnnnnnnnnnnnnnnnnnnnnnnnnnnnnnnnnnnnnnnnnnnnnnnnnnnnnnnnnnnnnnnnnnnnnnnnnnnnnnnnnnnnnnnnnnnnnnnnnnnnnnnnnnnnnnnnnnnnnnnnnnnnnnnnnnnnnnnnnnnnnnnnnnnnnnnnnnnnnnnnnnnnnnnnnnnnnnnnnnnnnnnnnnnnnnnnnnnnnnnnnnnnnnnnnnnnnnnnnnnnnnnnnnnnnnnnnnnnnnnnnnnnnnnnnnnnnnnnnnnnnnnnnnnnnnnnnnnnnnnnnnnnnnnnnnnnnnnnnnnnnnnnnnnnnnnnnnnnnnnnnnnnnnnnnnnnnnnnnnnnnnnnnnnnnnnnnnnnnnnnnnnnnnnnnnnnnnnnnnnnnnnnnnnnnnnnnnnnnnnnnnnnnnnnnnnnnnnnnnnnnnnnnnnnnnnnnnnnnnnnnnnnnnnnnnnnnnnnnnnnnnnnnnnnnnnnnnnnnnnnnnnnnnnnnnnnnnnnnnnnnnnnnnnnnnnnnnnnnnnnnnnnnnnnnnnnnnnnnnnnnnnnnnnnnnnnnnnnnnnnnnnnnnnnnnnnnnnnnnnnnnnnnnnnnnnnnnnnnnnnnnnnnnnnnnnnnnnnnnnnnnnnnnnnnnnnnnnnnnnnnnnnnnnnnnnnnnnnnnnnnnnnnnnnnnnnnnnnnnnnnnnnnnnnnnnnnnnnnnnnnnnnnnnnnnnnnnnnnnnnnnnnnnnnnnnnnnnnnnnnnnnnnnnnnnnnnnnnnnnnnnnnnnnnnnnnnnnnnnnnnnnnnnnnnnnnnnnnnnnnnnnnnnnnnnnnnnnnnnnnnnnnnnnnnnnnnnnnnnnnnnnnnnnnnnnnnnnnnnnnnnnnnnnnnnnnnnnnnnnnnnnnnnnnnnnnnnnnnnnnnnnnnnnnnnnnnnnnnnnnnnnnnnnnnnnnnnnnnnnnnnnnnnnnnnnnnnnnnnnnnnnnnnnnnnnnnnnnnnnnnnnnnnnnnnnnnnnnnnnnnnnnnnnnnnnnnnnnnnnnnnnnnnnnnnnnnnnnnnnnnnnnnnnnnnnnnnnnnnnnnnnnnnnnnnnnnnnnnnnnnnnnnnnnnnnnnnnnnnnnnnnnnnnnnnnnnnnnnnnnnnnnnnnnnnnnnnnnnnnnnnnnnnnnnnnnnnnnnnnnnnnnnnnnnnnnnnnnnnnnnnnnnnnnnnnnnnnnnnnnnnnnnnnnnnnnnnnnnnnnnnnnnnnnnnnnnnnnnnnnnnnnnnnnnnnnnnnnnnnnnnnnnnnnnnnnnnnnnnnnnnnnnnnnnnnnnnnnnnnnnnnnnnnnnnnnnnnnnnnnnnnnnnnnnnnnnnnnnnnnnnnnnnnnnnnnnnnnnnnnnnnnnnnnnnnnnnnnnnnnnnnnnnnnnnnnnnnnnnnnnnnnnnnnnnnnnnnnnnnnnnnnnnnnnnnnnnnnnnnnnnnnnnnnnnnnnnnnnnnnnnnnnnnnnnnnnnnnnnnnnnnnnnnnnnnnnnnnnnnnnnnnnnnnnnnnnnnnnnnnnnnnnnnnnnnnnnnnnnnnnnnnnnnnnnnnnnnnnnnnnnnnnnnnnnnnnnnnnnnnnnnnnnnnnnnnnnnnnnnnnnnnnnnnnnnnnnnnnnnnnnnnnnnnnnnnnnnnnnnnnnnnnnnnnnnnnnnnnnnnnnnnnnnnnnnnnnnnnnnnnnnnnnnnnnnnnnnnnnnnnnnnnnnnnnnnnnnnnnnnnnnnnnnnnnnnnnnnnnnnnnnnnnnnnnnnnnnnnnnnnnnnnnnnnnnnnnnnnnnnnnnnnnnnnnnnnnnnnnnnnnnnnnnnnnnnnnnnnnnnnnnnnnnnnnnnnnnnnnnnnnnnnnnnnnnnnnnnnnnnnnnnnnnnnnnnnnnnnnnnnnnnnnnnnnnnnnnnnnnnnnnnnnnnnnnnnnnnnnnnnnnnnnnnnnnnnnnnnnnnnnnnnnnnnnnnnnnnnnnnnnnnnnnnnnnnnnnnnnnnnnnnnnnnnnnnnnnnnnnnnnnnnnnnnnnnnnnnnnnnnnnnnnnnnnnnnnnnnnnnnnnnnnnnnnnnnnnnnnnnnnnnnnnnnnnnnnnnnnnnnnnnnnnnnnnnnnnnnnnnnnnnnnnnnnnnnnnnnnnnnnnnnnnnnnnnnnnnnnnnnnnnnnnnnnnnnnnnnnnnnnnnnnnnnnnnnnnnnnnnnnnnnnnnnnnnnnnnnnnnnnnnnnnnnnnnnnnnnnnnnnnnnnnnnnnnnnnnnnnnnnnnnnnnnnnnnnnnnnnnnnnnnnnnnnnnnnnnnnnnnnnnnnnnnnnnnnnnnnnnnnnnnnnnnnnnnnnnnnnnnnnnnnnnnnnnnnnnnnnnnnnnnnnnnnnnnnnnnnnnnnnnnnnnnnnnnnnnnnnnnnnnnnnnnnnnnnnnnnnnnnnnnnnnnnnnnnnnnnnnnnnnnnnnnnnnnnnnnnnnnnnnnnnnnnnnnnnnnnnnnnnnnnnnnnnnnnnnnnnnnnnnnnnnnnnnnnnnnnnnnnnnnnnnnnnnnnnnnnnnnnnnnnnnnnnnnnnnnnnnnnnnnnnnnnnnnnnnnnnnnnnnnnnnnnnnnnnnnnnnnnnnnnnnnnnnnnnnnnnnnnnnnnnnnnnnnnnnnnnnnnnnnnnnnnnnnnnnnnnnnnnnnnnnnnnnnnnnnnnnnnnnnnnnnnnnnnnnnnnnnnnnnnnnnnnnnnnnnnnnnnnnnnnnnnnnnnnnnnnnnnnnnnnnnnnnnnnnnnnnnnnnnnnnnnnnnnnnnnnnnnnnnnnnnnnnnnnnnnnnnnnnnnnnnnnnnnnnnnnnnnnnnnnnnnnnnnnnnnnnnnnnnnnnnnnnnnnnnnnnnnnnnnnnnnnnnnnnnnnnnnnnnnnnnnnnnnnnnnnnnnnnnnnnnnnnnnnnnnnnnnnnnnnnnnnnnnnnnnnnnnnnnnnnnnnnnnnnnnnnnnnnnnnnnnnnnnnnnnnnnnnnnnnnnnnnnnnnnnnnnnnnnnnnnnnnnnnnnnnnnnnnnnnnnnnnnnnnnnnnnnnnnnnnnnnnnnnnnnnnnnnnnnnnnnnnnnnnnnnnnnnnnnnnnnnnnnnnnnnnnnnnnnnnnnnnnnnnnnnnnnnnnnnnnnnnnnnnnnnnnnnnnnnnnnnnnnnnnnnnnnnnnnnnnnnnnnnnnnnnnnnnnnnnnnnnnnnnnnnnnnnnnnnnnnnnnnnnnnnnnnnnnnnnnnnnnnnnnnnnnnnnnnnnnnnnnnnnnnnnnnnnnnnnnnnnnnnnnnnnnnnnnnnnnnnnnnnnnnnnnnnnnnnnnnnnnnnnnnnnnnnnnnnnnnnnnnnnnnnnnnnnnnnnnnnnnnnnnnnnnnnnnnnnnnnnnnnnnnnnnnnnnnnnnnnnnnnnnnnnnnnnnnnnnnnnnnnnnnnnnnnnnnnnnnnnnnnnnnnnnnnnnnnnnnnnnnnnnnnnnnnnnnnnnnnnnnnnnnnnnnnnnnnnnnnnnnnnnnnnnnnnnnnnnnnnnnnnnnnnnnnnnnnnnnnnnnnnnnnnnnnnnnnnnnnnnnnnnnnnnnnnnnnnnnnnnnnnnnnnnnnnnnnnnnnnnnnnnnnnnnnnnnnnnnnnnnnnnnnnnnnnnnnnnnnnnnnnnnnnnnnnnnnnnnnnnnnnnnnnnnnnnnnnnnnnnnnnnnnnnnnnnnnnnnnnnnnnnnnnnnnnnnnnnnnnnnnnnnnnnnnnnnnnnnnnnnnnnnnnnnnnnnnnnnnnnnnnnnnnnnnnnnnnnnnnnnnnnnnnnnnnnnnnnnnnnnnnnnnnnnnnnnnnnnnnnnnnnnnnnnnnnnnnnnnnnnnnnnnnnnnnnnnnnnnnnnnnnnnnnnnnnnnnnnnnnnnnnnnnnnnnnnnnnnnnnnnnnnnnnnnnnnnnnnnnnnnnnnnnnnnnnnnnnnnnnnnnnnnnnnnnnnnnnnnnnnnnnnnnnnnnnnnnnnnnnnnnnnnnnnnnnnnnnnnnnnnnnnnnnnnnnnnnnnnnnnnnnnnnnnnnnnnnnnnnnnnnnnnnnnnnnnnnnnnnnnnnnnnnnnnnnnnnnnnnnnnnnnnnnnnnnnnnnnnnnnnnnnnnnnnnnnnnnnnnnnnnnnnnnnnnnnnnnnnnnnnnnnnnnnnnnnnnnnnnnnnnnnnnnnnnnnnnnnnnnnnnnnnnnnnnnnnnnnnnnnnnnnnnnnnnnnnnnnnnnnnnnnnnnnnnnnnnnnnnnnnnnnnnnnnnnnnnnnnnnnnnnnnnnnnnnnnnnnnnnnnnnnnnnnnnnnnnnnnnnnnnnnnnnnnnnnnnnnnnnnnnnnnnnnnnnnnnnnnnnnnnnnnnnnnnnnnnnnnnnnnnnnnnnnnnnnnnnnnnnnnnnnnnnnnnnnnnnnnnnnnnnnnnnnnnnnnnnnnnnnnnnnnnnnnnnnnnnnnnnnnnnnnnnnnnnnnnnnnnnnnnnnnnnnnnnnnnnnnnnnnnnnnnnnnnnnnnnnnnnnnnnnnnnnnnnnnnnnnnnnnnnnnnnnnnnnnnnnnnnnnnnnnnnnnnnnnnnnnnnnnnnnnnnnnnnnnnnnnnnnnnnnnnnnnnnnnnnnnnnnnnnnnnnnnnnnnnnnnnnnnnnnnnnnnnnnnnnnnnnnnnnnnnnnnnnnnnnnnnnnnnnnnnnnnnnnnnnnnnnnnnnnnnnnnnnnnnnnnnnnnnnnnnnnnnnnnnnnnnnnnnnnnnnnnnnnnnnnnnnnnnnnnnnnnnnnnnnnnnnnnnnnnnnnnnnnnnnnnnnnnnnnnnnnnnnnnnnnnnnnnnnnnnnnnnnnnnnnnnnnnnnnnnnnnnnnnnnnnnnnnnnnnnnnnnnnnnnnnnnnnnnnnnnnnnnnnnnnnnnnnnnnnnnnnnnnnnnnnnnnnnnnnnnnnnnnnnnnnnnnnnnnnnnnnnnnnnnnnnnnnnnnnnnnnnnnnnnnnnnnnnnnnnnnnnnnnnnnnnnnnnnnnnnnnnnnnnnnnnnnnnnnnnnnnnnnnnnnnnnnnnnnnnnnnnnnnnnnnnnnnnnnnnnnnnnnnnnnnnnnnnnnnnnnnnnnnnnnnnnnnnnnnnnnnnnnnnnnnnnnnnnnnnnnnnnnnnnnnnnnnnnnnnnnnnnnnnnnnnnnnnnnnnnnnnnnnnnnnnnnnnnnnnnnnnnnnnnnnnnnnnnnnnnnnnnnnnnnnnnnnnnnnnnnnnnnnnnnnnnnnnnnnnnnnnnnnnnnnnnnnnnnnnnnnnnnnnnnnnnnnnnnnnnnnnnnnnnnnnnnnnnnnnnnnnnnnnnnnnnnnnnnnnnnnnnnnnnnnnnnnnnnnnnnnnnnnnnnnnnnnnnnnnnnnnnnnnnnnnnnnnnnnnnnnnnnnnnnnnnnnnnnnnnnnnnnnnnnnnnnnnnnnnnnnnnnnnnnnnnnnnnnnnnnnnnnnnnnnnnnnnnnnnnnnnnnnnnnnnnnnnnnnnnnnnnnnnnnnnnnnnnnnnnnnnnnnnnnnnnnnnnnnnnnnnnnnnnnnnnnnnnnnnnnnnnnnnnnnnnnnnnnnnnnnnnnnnnnnnnnnnnnnnnnnnnnnnnnnnnnnnnnnnnnnnnnnnnnnnnnnnnnnnnnnnnnnnnnnnnnnnnnnnnnnnnnnnnnnnnnnnnnnnnnnnnnnnnnnnnnnnnnnnnnnnnnnnnnnnnnnnnnnnnnnnnnnnnnnnnnnnnnnnnnnnnnnnnnnnnnnnnnnnnnnnnnnnnnnnnnnnnnnnnnnnnnnnnnnnnnnnnnnnnnnnnnnnnnnnnnnnnnnnnnnnnnnnnnnnnnnnnnnnnnnnnnnnnnnnnnnnnnnnnnnnnnnnnnnnnnnnnnnnnnnnnnnnnnnnnnnnnnnnnnnnnnnnnnnnnnnnnnnnnnnnnnnnnnnnnnnnnnnnnnnnnnnnnnnnnnnnnnnnnnnnnnnnnnnnnnnnnnnnnnnnnnnnnnnnnnnnnnnnnnnnnnnnnnnnnnnnnnnnnnnnnnnnnnnnnnnnnnnnnnnnnnnnnnnnnnnnnnnnnnnnnnnnnnnnnnnnnnnnnnnnnnnnnnnnnnnnnnnnnnnnnnnnnnnnnnnnnnnnnnnnnnnnnnnnnnnnnnnnnnnnnnnnnnnnnnnnnnnnnnnnnnnnnnnnnnnnnnnnnnnnnnnnnnnnnnnnnnnnnnnnnnnnnnnnnnnnnnnnnnnnnnnnnnnnnnnnnnnnnnnnnnnnnnnnnnnnnnnnnnnnnnnnnnnnnnnnnnnnnnnnnnnnnnnnnnnnnnnnnnnnnnnnnnnnnnnnnnnnnnnnnnnnnnnnnnnnnnnnnnnnnnnnnnnnnnnnnnnnnnnnnnnnnnnnnnnnnnnnnnnnnnnnnnnnnnnnnnnnnnnnnnnnnnnnnnnnnnnnnnnnnnnnnnnnnnnnnnnnnnnnnnnnnnnnnnnnnnnnnnnnnnnnnnnnnnnnnnnnnnnnnnnnnnnnnnnnnnnnnnnnnnnnnnnnnnnnnnnnnnnnnnnnnnnnnnnnnnnnnnnnnnnnnnnnnnnnnnnnnnnnnnnnnnnnnnnnnnnnnnnnnnnnnnnnnnnnnnnnnnnnnnnnnnnnnnnnnnnnnnnnnnnnnnnnnnnnnnnnnnnnnnnnnnnnnnnnnnnnnnnnnnnnnnnnnnnnnnnnnnnnnnnnnnnnnnnnnnnnnnnnnnnnnnnnnnnnnnnnnnnnnnnnnnnnnnnnnnnnnnnnnnnnnnnnnnnnnnnnnnnnnnnnnnnnnnnnnnnnnnnnnnnnnnnnnnnnnnnnnnnnnnnnnnnnnnnnnnnnnnnnnnnnnnnnnnnnnnnnnnnnnnnnnnnnnnnnnnnnnnnnnnnnnnnnnnnnnnnnnnnnnnnnnnnnnnnnnnnnnnnnnnnnnnnnnnnnnnnnnnnnnnnnnnnnnnnnnnnnnnnnnnnnnnnnnnnnnnnnnnnnnnnnnnnnnnnnnnnnnnnnnnnnnnnnnnnnnnnnnnnnnnnnnnnnnnnnnnnnnnnnnnnnnnnnnnnnnnnnnnnnnnnnnnnnnnnnnnnnnnnnnnnnnnnnnnnnnnnnnnnnnnnnnnnnnnnnnnnnnnnnnnnnnnnnnnnnnnnnnnnnnnnnnnnnnnnnnnnnnnnnnnnnnnnnnnnnnnnnnnnnnnnnnnnnnnnnnnnnnnnnnnnnnnnnnnnnnnnnnnnnnnnnnnnnnnnnnnnnnnnnnnnnnnnnnnnnnnnnnnnnnnnnnnnnnnnnnnnnnnnnnnnnnnnnnnnnnnnnnnnnnnnnnnnnnnnnnnnnnnnnnnnnnnnnnnnnnnnnnnnnnnnnnnnnnnnnnnnnnnnnnnnnnnnnnnnnnnnnnnnnnnnnnnnnnnnnnnnnnnnnnnnnnnnnnnnnnnnnnnnnnnnnnnnnnnnnnnnnnnnnnnnnnnnnnnnnnnnnnnnnnnnnnnnnnnnnnnnnnnnnnnnnnnnnnnnnnnnnnnnnnnnnnnnnnnnnnnnnnnnnnnnnnnnnnnnnnnnnnnnnnnnnnnnnnnnnnnnnnnnnnnnnnnnnnnnnnnnnnnnnnnnnnnnnnnnnnnnnnnnnnnnnnnnnnnnnnnnnnnnnnnnnnnnnnnnnnnnnnnnnnnnnnnnnnnnnnnnnnnnnnnnnnnnnnnnnnnnnnnnnnnnnnnnnnnnnnnnnnnnnnnnnnnnnnnnnnnnnnnnnnnnnnnnnnnnnnnnnnnnnnnnnnnnnnnnnnnnnnnnnnnnnnnnnnnnnnnnnnnnnnnnnnnnnnnnnnnnnnnnnnnnnnnnnnnnnnnnnnnnnnnnnnnnnnnnnnnnnnnnnnnnnnnnnnnnnnnnnnnnnnnnnnnnnnnnnnnnnnnnnnnnnnnnnnnnnnnnnnnnnnnnnnnnnnnnnnnnnnnnnnnnnnnnnnnnnnnnnnnnnnnnnnnnnnnnnnnnnnnnnnnnnnnnnnnnnnnnnnnnnnnnnnnnnnnnnnnnnnnnnnnnnnnnnnnnnnnnnnnnnnnnnnnnnnnnnnnnnnnnnnnnnnnnnnnnnnnnnnnnnnnnnnnnnnnnnnnnnnnnnnnnnnnnnnnnnnnnnnnnnnnnnnnnnnnnnnnnnnnnnnnnnnnnnnnnnnnnnnnnnnnnnnnnnnnnnnnnnnnnnnnnnnnnnnnnnnnnnnnnnnnnnnnnnnnnnnnnnnnnnnnnnnnnnnnnnnnnnnnnnnnnnnnnnnnnnnnnnnnnnnnnnnnnnnnnnnnnnnnnnnnnnnnnnnnnnnnnnnnnnnnnnnnnnnnnnnnnnnnnnnnnnnnnnnnnnnnnnnnnnnnnnnnnnnnnnnnnnnnnnnnnnnnnnnnnnnnnnnnnnnnnnnnnnnnnnnnnnnnnnnnnnnnnnnnnnnnnnnnnnnnnnnnnnnnnnnnnnnnnnnnnnnnnnnnnnnnnnnnnnnnnnnnnnnnnnnnnnnnnnnnnnnnnnnnnnnnnnnnnnnnnnnnnnnnnnnnnnnnnnnnnnnnnnnnnnnnnnnnnnnnnnnnnnnnnnnnnnnnnnnnnnnnnnnnnnnnnnnnnnnnnnnnnnnnnnnnnnnnnnnnnnnnnnnnnnnnnnnnnnnnnnnnnnnnnnnnnnnnnnnnnnnnnnnnnnnnnnnnnnnnnnnnnnnnnnnnnnnnnnnnnnnnnnnnnnnnnnnnnnnnnnnnnnnnnnnnnnnnnnnnnnnnnnnnnnnnnnnnnnnnnnnnnnnnnnnnnnnnnnnnnnnnnnnnnnnnnnnnnnnnnnnnnnnnnnnnnnnnnnnnnnnnnnnnnnnnnnnnnnnnnnnnnnnnnnnnnnnnnnnnnnnnnnnnnnnnnnnnnnnnnnnnnnnnnnnnnnnnnnnnnnnnnnnnnnnnnnnnnnnnnnnnnnnnnnnnnnnnnnnnnnnnnnnnnnnnnnnnnnnnnnnnnnnnnnnnnnnnnnnnnnnnnnnnnnnnnnnnnnnnnnnnnnnnnnnnnnnnnnnnnnnnnnnnnnnnnnnnnnnnnnnnnnnnnnnnnnnnnnnnnnnnnnnnnnnnnnnnnnnnnnnnnnnnnnnnnnnnnnnnnnnnnnnnnnnnnnnnnnnnnnnnnnnnnnnnnnnnnnnnnnnnnnnnnnnnnnnnnnnnnnnnnnnnnnnnnnnnnnnnnnnnnnnnnnnnnnnnnnnnnnnnnnnnnnnnnnnnnnnnnnnnnnnnnnnnnnnnnnnnnnnnnnnnnnnnnnnnnnnnnnnnnnnnnnnnnnnnnnnnnnnnnnnnnnnnnnnnnnnnnnnnnnnnnnnnnnnnnnnnnnnnnnnnnnnnnnnnnnnnnnnnnnnnnnnnnnnnnnnnnnnnnnnnnnnnnnnnnnnnnnnnnnnnnnnnnnnnnnnnnnnnnnnnnnnnnnnnnnnnnnnnnnnnnnnnnnnnnnnnnnnnnnnnnnnnnnnnnnnnnnnnnnnnnnnnnnnnnnnnnnnnnnnnnnnnnnnnnnnnnnnnnnnnnnnnnnnnnnnnnnnnnnnnnnnnnnnnnnnnnnnnnnnnnnnnnnnnnnnnnnnnnnnnnnnnnnnnnnnnnnnnnnnnnnnnnnnnnnnnnnnnnnnnnnnnnnnnnnnnnnnnnnnnnnnnnnnnnnnnnnnnnnnnnnnnnnnnnnnnnnnnnnnnnnnnnnnnnnnnnnnnnnnnnnnnnnnnnnnnnnnnnnnnnnnnnnnnnnnnnnnnnnnnnnnnnnnnnnnnnnnnnnnnnnnnnnnnnnnnnnnnnnnnnnnnnnnnnnnnnnnnnnnnnnnnnnnnnnnnnnnnnnnnnnnnnnnnnnnnnnnnnnnnnnnnnnnnnnnnnnnnnnnnnnnnnnnnnnnnnnnnnnnnnnnnnnnnnnnnnnnnnnnnnnnnnnnnnnnnnnnnnnnnnnnnnnnnnnnnnnnnnnnnnnnnnnnnnnnnnnnnnnnnnnnnnnnnnnnnnnnnnnnnnnnnnnnnnnnnnnnnnnnnnnnnnnnnnnnnnnnnnnnnnnnnnnnnnnnnnnnnnnnnnnnnnnnnnnnnnnnnnnnnnnnnnnnnnnnnnnnnnnnnnnnnnnnnnnnnnnnnnnnnnnnnnnnnnnnnnnnnnnnnnnnnnnnnnnnnnnnnnnnnnnnnnnnnnnnnnnnnnnnnnnnnnnnnnnnnnnnnnnnnnnnnnnnnnnnnnnnnnnnnnnnnnnnnnnnnnnnnnnnnnnnnnnnnnnnnnnnnnnnnnnnnnnnnnnnnnnnnnnnnnnnnnnnnnnnnnnnnnnnnnnnnnnnnnnnnnnnnnnnnnnnnnnnnnnnnnnnnnnnnnnnnnnnnnnnnnnnnnnnnnnnnnnnnnnnnnnnnnnnnnnnnnnnnnnnnnnnnnnnnnnnnnnnnnnnnnnnnnnnnnnnnnnnnnnnnnnnnnnnnnnnnnnnnnnnnnnnnnnnnnnnnnnnnnnnnnnnnnnnnnnnnnnnnnnnnnnnnnnnnnnnnnnnnnnnnnnnnnnnnnnnnnnnnnnnnnnnnnnnnnnnnnnnnnnnnnnnnnnnnnnnnnnnnnnnnnnnnnnnnnnnnnnnnnnnnnnnnnnnnnnnnnnnnnnnnnnnnnnnnnnnnnnnnnnnnnnnnnnnnnnnnnnnnnnnnnnnnnnnnnnnnnnnnnnnnnnnnnnnnnnnnnnnnnnnnnnnnnnnnnnnnnnnnnnnnnnnnnnnnnnnnnnnnnnnnnnnnnnnnnnnnnnnnnnnnnnnnnnnnnnnnnnnnnnnnnnnnnnnnnnnnnnnnnnnnnnnnnnnnnnnnnnnnnnnnnnnnnnnnnnnnnnnnnnnnnnnnnnnnnnnnnnnnnnnnnnnnnnnnnnnnnnnnnnnnnnnnnnnnnnnnnnnnnnnnnnnnnnnnnnnnnnnnnnnnnnnnnnnnnnnnnnnnnnnnnnnnnnnnnnnnnnnnnnnnnnnnnnnnnnnnnnnnnnnnnnnnnnnnnnnnnnnnnnnnnnnnnnnnnnnnnnnnnnnnnnnnnnnnnnnnnnnnnnnnnnnnnnnnnnnnnnnnnnnnnnnnnnnnnnnnnnnnnnnnnnnnnnnnnnnnnnnnnnnnnnnnnnnnnnnnnnnnnnnnnnnnnnnnnnnnnnnnnnnnnnnnnnnnnnnnnnnnnnnnnnnnnnnnnnnnnnnnnnnnnnnnnnnnnnnnnnnnnnnnnnnnnnnnnnnnnnnnnnnnnnnnnnnnnnnnnnnnnnnnnnnnnnnnnnnnnnnnnnnnnnnnnnnnnnnnnnnnnnnnnnnnnnnnnnnnnnnnnnnnnnnnnnnnnnnnnnnnnnnnnnnnnnnnnnnnnnnnnnnnnnnnnnnnnnnnnnnnnnnnnnnnnnnnnnnnnnnnnnnnnnnnnnnnnnnnnnnnnnnnnnnnnnnnnnnnnnnnnnnnnnnnnnnnnnnnnnnnnnnnnnnnnnnnnnnnnnnnnnnnnnnnnnnnnnnnnnnnnnnnnnnnnnnnnnnnnnnnnnnnnnnnnnnnnnnnnnnnnnnnnnnnnnnnnnnnnnnnnnnnnnnnnnnnnnnnnnnnnnnnnnnnnnnnnnnnnnnnnnnnnnnnnnnnnnnnnnnnnnnnnnnnnnnnnnnnnnnnnnnnnnnnnnnnnnnnnnnnnnnnnnnnnnnnnnnnnnnnnnnnnnnnnnnnnnnnnnnnnnnnnnnnnnnnnnnnnnnnnnnnnnnnnnnnnnnnnnnnnnnnnnnnnnnnnnnnnnnnnnnnnnnnnnnnnnnnnnnnnnnnnnnnnnnnnnnnnnnnnnnnnnnnnnnnnnnnnnnnnnnnnnnnnnnnnnnnnnnnnnnnnnnnnnnnnnnnnnnnnnnnnnnnnnnnnnnnnnnnnnnnnnnnnnnnnnnnnnnnnnnnnnnnnnnnnnnnnnnnnnnnnnnnnnnnnnnnnnnnnnnnnnnnnnnnnnnnnnnnnnnnnnnnnnnnnnnnnnnnnnnnnnnnnnnnnnnnnnnnnnnnnnnnnnnnnnnnnnnnnnnnnnnnnnnnnnnnnnnnnnnnnnnnnnnnnnnnnnnnnnnnnnnnnnnnnnnnnnnnnnnnnnnnnnnnnnnnnnnnnnnnnnnnnnnnnnnnnnnnnnnnnnnnnnnnnnnnnnnnnnnnnnnnnnnnnnnnnnnnnnnnnnnnnnnnnnnnnnnnnnnnnnnnnnnnnnnnnnnnnnnnnnnnnnnnnnnnnnnnnnnnnnnnnnnnnnnnnnnnnnnnnnnnnnnnnnnnnnnnnnnnnnnnnnnnnnnnnnnnnnnnnnnnnnnnnnnnnnnnnnnnnnnnnnnnnnnnnnnnnnnnnnnnnnnnnnnnnnnnnnnnnnnnnnnnnnnnnnnnnnnnnnnnnnnnnnnnnnnnnnnnnnnnnnnnnnnnnnnnnnnnnnnnnnnnnnnnnnnnnnnnnnnnnnnnnnnnnnnnnnnnnnnnnnnnnnnnnnnnnnnnnnnnnnnnnnnnnnnnnnnnnnnnnnnnnnnnnnnnnnnnnnnnnnnnnnnnnnnnnnnnnnnnnnnnnnnnnnnnnnnnnnnnnnnnnnnnnnnnnnnnnnnnnnnnnnnnnnnnnnnnnnnnnnnnnnnnnnnnnnnnnnnnnnnnnnnnnnnnnnnnnnnnnnnnnnnnnnnnnnnnnnnnnnnnnnnnnnnnnnnnnnnnnnnnnnnnnnnnnnnnnnnnnnnnnnnnnnnnnnnnnnnnnnnnnnnnnnnnnnnnnnnnnnnnnnnnnnnnnnnnnnnnnnnnnnnnnnnnnnnnnnnnnnnnnnnnnnnnnnnnnnnnnnnnnnnnnnnnnnnnnnnnnnnnnnnnnnnnnnnnnnnnnnnnnnnnnnnnnnnnnnnnnnnnnnnnnnnnnnnnnnnnnnnnnnnnnnnnnnnnnnnnnnnnnnnnnnnnnnnnnnnnnnnnnnnnnnnnnnnnnnnnnnnnnnnnnnnnnnnnnnnnnnnnnnnnnnnnnnnnnnnnnnnnnnnnnnnnnnnnnnnnnnnnnnnnnnnnnnnnnnnnnnnnnnnnnnnnnnnnnnnnnnnnnnnnnnnnnnnnnnnnnnnnnnnnnnnnnnnnnnnnnnnnnnnnnnnnnnnnnnnnnnnnnnnnnnnnnnnnnnnnnnnnnnnnnnnnnnnnnnnnnnnnnnnnnnnnnnnnnnnnnnnnnnnnnnnnnnnnnnnnnnnnnnnnnnnnnnnnnnnnnnnnnnnnnnnnnnnnnnnnnnnnnnnnnnnnnnnnnnnnnnnnnnnnnnnnnnnnnnnnnnnnnnnnnnnnnnnnnnnnnnnnnnnnnnnnnnnnnnnnnnnnnnnnnnnnnnnnnnnnnnnnnnnnnnnnnnnnnnnnnnnnnnnnnnnnnnnnnnnnnnnnnnnnnnnnnnnnnnnnnnnnnnnnnnnnnnnnnnnnnnnnnnnnnnnnnnnnnnnnnnnnnnnnnnnnnnnnnnnnnnnnnnnnnnnnnnnnnnnnnnnnnnnnnnnnnnnnnnnnnnnnnnnnnnnnnnnnnnnnnnnnnnnnnnnnnnnnnnnnnnnnnnnnnnnnnnnnnnnnnnnnnnnnnnnnnnnnnnnnnnnnnnnnnnnnnnnnnnnnnnnnnnnnnnnnnnnnnnnnnnnnnnnnnnnnnnnnnnnnnnnnnnnnnnnnnnnnnnnnnnnnnnnnnnnnnnnnnnnnnnnnnnnnnnnnnnnnnnnnnnnnnnnnnnnnnnnnnnnnnnnnnnnnnnnnnnnnnnnnnnnnnnnnnnnnnnnnnnnnnnnnnnnnnnnnnnnnnnnnnnnnnnnnnnnnnnnnnnnnnnnnnnnnnnnnnnnnnnnnnnnnnnnnnnnnnnnnnnnnnnnnnnnnnnnnnnnnnnnnnnnnnnnnnnnnnnnnnnnnnnnnnnnnnnnnnnnnnnnnnnnnnnnnnnnnnnnnnnnnnnnnnnnnnnnnnnnnnnnnnnnnnnnnnnnnnnnnnnnnnnnnnnnnnnnnnnnnnnnnnnnnnnnnnnnnnnnnnnnnnnnnnnnnnnnnnnnnnnnnnnnnnnnnnnnnnnnnnnnnnnnnnnnnnnnnnnnnnnnnnnnnnnnnnnnnnnnnnnnnnnnnnnnnnnnnnnnnnnnnnnnnnnnnnnnnnnnnnnnnnnnnnnnnnnnnnnnnnnnnnnnnnnnnnnnnnnnnnnnnnnnnnnnnnnnnnnnnnnnnnnnnnnnnnnnnnnnnnnnnnnnnnnnnnnnnnnnnnnnnnnnnnnnnnnnnnnnnnnnnnnnnnnnnnnnnnnnnnnnnnnnnnnnnnnnnnnnnnnnnnnnnnnnnnnnnnnnnnnnnnnnnnnnnnnnnnnnnnnnnnnnnnnnnnnnnnnnnnnnnnnnnnnnnnnnnnnnnnnnnnnnnnnnnnnnnnnnnnnnnnnnnnnnnnnnnnnnnnnnnnnnnnnnnnnnnnnnnnnnnnnnnnnnnnnnnnnnnnnnnnnnnnnnnnnnnnnnnnnnnnnnnnnnnnnnnnnnnnnnnnnnnnnnnnnnnnnnnnnnnnnnnnnnnnnnnnnnnnnnnnnnnnnnnnnnnnnnnnnnnnnnnnnnnnnnnnnnnnnnnnnnnnnnnnnnnnnnnnnnnnnnnnnnnnnnnnnnnnnnnnnnnnnnnnnnnnnnnnnnnnnnnnnnnnnnnnnnnnnnnnnnnnnnnnnnnnnnnnnnnnnnnnnnnnnnnnnnnnnnnnnnnnnnnnnnnnnnnnnnnnnnnnnnnnnnnnnnnnnnnnnnnnnnnnnnnnnnnnnnnnnnnnnnnnnnnnnnnnnnnnnnnnnnnnnnnnnnnnnnnnnnnnnnnnnnnnnnnnnnnnnnnnnnnnnnnnnnnnnnnnnnnnnnnnnnnnnnnnnnnnnnnnnnnnnnnnnnnnnnnnnnnnnnnnnnnnnnnnnnnnnnnnnnnnnnnnnnnnnnnnnnnnnnnnnnnnnnnnnnnnnnnnnnnnnnnnnnnnnnnnnnnnnnnnnnnnnnnnnnnnnnnnnnnnnnnnnnnnnnnnnnnnnnnnnnnnnnnnnnnnnnnnnnnnnnnnnnnnnnnnnnnnnnnnnnnnnnnnnnnnnnnnnnnnnnnnnnnnnnnnnnnnnnnnnnnnnnnnnnnnnnnnnnnnnnnnnnnnnnnnnnnnnnnnnnnnnnnnnnnnnnnnnnnnnnnnnnnnnnnnnnnnnnnnnnnnnnnnnnnnnnnnnnnnnnnnnnnnnnnnnnnnnnnnnnnnnnnnnnnnnnnnnnnnnnnnnnnnnnnnnnnnnnnnnnnnnnnnnnnnnnnnnnnnnnnnnnnnnnnnnnnnnnnnnnnnnnnnnnnnnnnnnnnnnnnnnnnnnnnnnnnnnnnnnnnnnnnnnnnnnnnnnnnnnnnnnnnnnnnnnnnnnnnnnnnnnnnnnnnnnnnnnnnnnnnnnnnnnnnnnnnnnnnnnnnnnnnnnnnnnnnnnnnnnnnnnnnnnnnnnnnnnnnnnnnnnnnnnnnnnnnnnnnnnnnnnnnnnnnnnnnnnnnnnnnnnnnnnnnnnnnnnnnnnnnnnnnnnnnnnnnnnnnnnnnnnnnnnnnnnnnnnnnnnnnnnnnnnnnnnnnnnnnnnnnnnnnnnnnnnnnnnnnnnnnnnnnnnnnnnnnnnnnnnnnnnnnnnnnnnnnnnnnnnnnnnnnnnnnnnnnnnnnnnnnnnnnnnnnnnnnnnnnnnnnnnnnnnnnnnnnnnnnnnnnnnnnnnnnnnnnnnnnnnnnnnnnnnnnnnnnnnnnnnnnnnnnnnnnnnnnnnnnnnnnnnnnnnnnnnnnnnnnnnnnnnnnnnnnnnnnnnnnnnnnnnnnnnnnnnnnnnnnnnnnnnnnnnnnnnnnnnnnnnnnnnnnnnnnnnnnnnnnnnnnnnnnnnnnnnnnnnnnnnnnnnnnnnnnnnnnnnnnnnnnnnnnnnnnnnnnnnnnnnnnnnnnnnnnnnnnnnnnnnnnnnnnnnnnnnnnnnnnnnnnnnnnnnnnnnnnnnnnnnnnnnnnnnnnnnnnnnnnnnnnnnnnnnnnnnnnnnnnnnnnnnnnnnnnnnnnnnnnnnnnnnnnnnnnnnnnnnnnnnnnnnnnnnnnnnnnnnnnnnnnnnnnnnnnnnnnnnnnnnnnnnnnnnnnnnnnnnnnnnnnnnnnnnnnnnnnnnnnnnnnnnnnnnnnnnnnnnnnnnnnnnnnnnnnnnnnnnnnnnnnnnnnnnnnnnnnnnnnnnnnnnnnnnnnnnnnnnnnnnnnnnnnnnnnnnnnnnnnnnnnnnnnnnnnnnnnnnnnnnnnnnnnnnnnnnnnnnnnnnnnnnnnnnnnnnnnnnnnnnnnnnnnnnnnnnnnnnnnnnnnnnnnnnnnnnnnnnnnnnnnnnnnnnnnnnnnnnnnnnnnnnnnnnnnnnnnnnnnnnnnnnnnnnnnnnnnnnnnnnnnnnnnnnnnnnnnnnnnnnnnnnnnnnnnnnnnnnnnnnnnnnnnnnnnnnnnnnnnnnnnnnnnnnnnnnnnnnnnnnnnnnnnnnnnnnnnnnnnnnnnnnnnnnnnnnnnnnnnnnnnnnnnnnnnnnnnnnnnnnnnnnnnnnnnnnnnnnnnnnnnnnnnnnnnnnnnnnnnnnnnnnnnnnnnnnnnnnnnnnnnnnnnnnnnnnnnnnnnnnnnnnnnnnnnnnnnnnnnnnnnnnnnnnnnnnnnnnnnnnnnnnnnnnnnnnnnnnnnnnnnnnnnnnnnnnnnnnnnnnnnnnnnnnnnnnnnnnnnnnnnnnnnnnnnnnnnnnnnnnnnnnnnnnnnnnnnnnnnnnnnnnnnnnnnnnnnnnnnnnnnnnnnnnnnnnnnnnnnnnnnnnnnnnnnnnnnnnnnnnnnnnnnnnnnnnnnnnnnnnnnnnnnnnnnnnnnnnnnnnnnnnnnnnnnnnnnnnnnnnnnnnnnnnnnnnnnnnnnnnnnnnnnnnnnnnnnnnnnnnnnnnnnnnnnnnnnnnnnnnnnnnnnnnnnnnnnnnnnnnnnnnnnnnnnnnnnnnnnnnnnnnnnnnnnnnnnnnnnnnnnnnnnnnnnnnnnnnnnnnnnnnnnnnnnnnnnnnnnnnnnnnnnnnnnnnnnnnnnnnnnnnnnnnnnnnnnnnnnnnnnnnnnnnnnnnnnnnnnnnnnnnnnnnnnnnnnnnnnnnnnnnnnnnnnnnnnnnnnnnnnnnnnnnnnnnnnnnnnnnnnnnnnnnnnnnnnnnnnnnnnnnnnnnnnnnnnnnnnnnnnnnnnnnnnnnnnnnnnnnnnnnnnnnnnnnnnnnnnnnnnnnnnnnnnnnnnnnnnnnnnnnnnnnnnnnnnnnnnnnnnnnnnnnnnnnnnnnnnnnnnnnnnnnnnnnnnnnnnnnnnnnnnnnnnnnnnnnnnnnnnnnnnnnnnnnnnnnnnnnnnnnnnnnnnnnnnnnnnnnnnnnnnnnnnnnnnnnnnnnnnnnnnnnnnnnnnnnnnnnnnnnnnnnnnnnnnnnnnnnnnnnnnnnnnnnnnnnnnnnnnnnnnnnnnnnnnnnnnnnnnnnnnnnnnnnnnnnnnnnnnnnnnnnnnnnnnnnnnnnnnnnnnnnnnnnnnnnnnnnnnnnnnnnnnnnnnnnnnnnnnnnnnnnnnnnnnnnnnnnnnnnnnnnnnnnnnnnnnnnnnnnnnnnnnnnnnnnnnnnnnnnnnnnnnnnnnnnnnnnnnnnnnnnnnnnnnnnnnnnnnnnnnnnnnnnnnnnnnnnnnnnnnnnnnnnnnnnnnnnnnnnnnnnnnnnnnnnnnnnnnnnnnnnnnnnnnnnnnnnnnnnnnnnnnnnnnnnnnnnnnnnnnnnnnnnnnnnnnnnnnnnnnnnnnnnnnnnnnnnnnnnnnnnnnnnnnnnnnnnnnnnnnnnnnnnnnnnnnnnnnnnnnnnnnnnnnnnnnnnnnnnnnnnnnnnnnnnnnnnnnnnnnnnnnnnnnnnnnnnnnnnnnnnnnnnnnnnnnnnnnnnnnnnnnnnnnnnnnnnnnnnnnnnnnnnnnnnnnnnnnnnnnnnnnnnnnnnnnnnnnnnnnnnnnnnnnnnnnnnnnnnnnnnnnnnnnnnnnnnnnnnnnnnnnnnnnnnnnnnnnnnnnnnnnnnnnnnnnnnnnnnnnnnnnnnnnnnnnnnnnnnnnnnnnnnnnnnnnnnnnnnnnnnnnnnnnnnnnnnnnnnnnnnnnnnnnnnnnnnnnnnnnnnnnnnnnnnnnnnnnnnnnnnnnnnnnnnnnnnnnnnnnnnnnnnnnnnnnnnnnnnnnnnnnnnnnnnnnnnnnnnnnnnnnnnnnnnnnnnnnnnnnnnnnnnnnnnnnnnnnnnnnnnnnnnnnnnnnnnnnnnnnnnnnnnnnnnnnnnnnnnnnnnnnnnnnnnnnnnnnnnnnnnnnnnnnnnnnnnnnnnnnnnnnnnnnnnnnnnnnnnnnnnnnnnnnnnnnnnnnnnnnnnnnnnnnnnnnnnnnnnnnnnnnnnnnnnnnnnnnnnnnnnnnnnnnnnnnnnnnnnnnnnnnnnnnnnnnnnnnnnnnnnnnnnnnnnnnnnnnnnnnnnnnnnnnnnnnnnnnnnnnnnnnnnnnnnnnnnnnnnnnnnnnnnnnnnnnnnnnnnnnnnnnnnnnnnnnnnnnnnnnnnnnnnnnnnnnnnnnnnnnnnnnnnnnnnnnnnnnnnnnnnnnnnnnnnnnnnnnnnnnnnnnnnnnnnnnnnnnnnnnnnnnnnnnnnnnnnnnnnnnnnnnnnnnnnnnnnnnnnnnnnnnnnnnnnnnnnnnnnnnnnnnnnnnnnnnnnnnnnnnnnnnnnnnnnnnnnnnnnnnnnnnnnnnnnnnnnnnnnnnnnnnnnnnnnnnnnnnnnnnnnnnnnnnnnnnnnnnnnnnnnnnnnnnnnnnnnnnnnnnnnnnnnnnnnnnnnnnnnnnnnnnnnnnnnnnnnnnnnnnnnnnnnnnnnnnnnnnnnnnnnnnnnnnnnnnnnnnnnnnnnnnnnnnnnnnnnnnnnnnnnnnnnnnnnnnnnnnnnnnnnnnnnnnnnnnnnnnnnnnnnnnnnnnnnnnnnnnnnnnnnnnnnnnnnnnnnnnnnnnnnnnnnnnnnnnnnnnnnnnnnnnnnnnnnnnnnnnnnnnnnnnnnnnnnnnnnnnnnnnnnnnnnnnnnnnnnnnnnnnnnnnnnnnnnnnnnnnnnnnnnnnnnnnnnnnnnnnnnnnnnnnnnnnnnnnnnnnnnnnnnnnnnnnnnnnnnnnnnnnnnnnnnnnnnnnnnnnnnnnnnnnnnnnnnnnnnnnnnnnnnnnnnnnnnnnnnnnnnnnnnnnnnnnnnnnnnnnnnnnnnnnnnnnnnnnnnnnnnnnnnnnnnnnnnnnnnnnnnnnnnnnnnnnnnnnnnnnnnnnnnnnnnnnnnnnnnnnnnnnnnnnnnnnnnnnnnnnnnnnnnnnnnnnnnnnnnnnnnnnnnnnnnnnnnnnnnnnnnnnnnnnnnnnnnnnnnnnnnnnnnnnnnnnnnnnnnnnnnnnnnnnnnnnnnnnnnnnnnnnnnnnnnnnnnnnnnnnnnnnnnnnnnnnnnnnnnnnnnnnnnnnnnnnnnnnnnnnnnnnnnnnnnnnnnnnnnnnnnnnnnnnnnnnnnnnnnnnnnnnnnnnnnnnnnnnnnnnnnnnnnnnnnnnnnnnnnnnnnnnnnnnnnnnnnnnnnnnnnnnnnnnnnnnnnnnnnnnnnnnnnnnnnnnnnnnnnnnnnnnnnnnnnnnnnnnnnnnnnnnnnnnnnnnnnnnnnnnnnnnnnnnnnnnnnnnnnnnnnnnnnnnnnnnnnnnnnnnnnnnnnnnnnnnnnnnnnnnnnnnnnnnnnnnnnnnnnnnnnnnnnnnnnnnnnnnnnnnnnnnnnnnnnnnnnnnnnnnnnnnnnnnnnnnnnnnnnnnnnnnnnnnnnnnnnnnnnnnnnnnnnnnnnnnnnnnnnnnnnnnnnnnnnnnnnnnnnnnnnnnnnnnnnnnnnnnnnnnnnnnnnnnnnnnnnnnnnnnnnnnnnnnnnnnnnnnnnnnnnnnnnnnnnnnnnnnnnnnnnnnnnnnnnnnnnnnnnnnnnnnnnnnnnnnnnnnnnnnnnnnnnnnnnnnnnnnnnnnnnnnnnnnnnnnnnnnnnnnnnnnnnnnnnnnnnnnnnnnnnnnnnnnnnnnnnnnnnnnnnnnnnnnnnnnnnnnnnnnnnnnnnnnnnnnnnnnnnnnnnnnnnnnnnnnnnnnnnnnnnnnnnnnnnnnnnnnnnnnnnnnnnnnnnnnnnnnnnnnnnnnnnnnnnnnnnnnnnnnnnnnnnnnnnnnnnnnnnnnnnnnnnnnnnnnnnnnnnnnnnnnnnnnnnnnnnnnnnnnnnnnnnnnnnnnnnnnnnnnnnnnnnnnnnnnnnnnnnnnnnnnnnnnnnnnnnnnnnnnnnnnnnnnnnnnnnnnnnnnnnnnnnnnnnnnnnnnnnnnnnnnnnnnnnnnnnnnnnnnnnnnnnnnnnnnnnnnnnnnnnnnnnnnnnnnnnnnnnnnnnnnnnnnnnnnnnnnnnnnnnnnnnnnnnnnnnnnnnnnnnnnnnnnnnnnnnnnnnnnnnnnnnnnnnnnnnnnnnnnnnnnnnnnnnnnnnnnnnnnnnnnnnnnnnnnnnnnnnnnnnnnnnnnnnnnnnnnnnnnnnnnnnnnnnnnnnnnnnnnnnnnnnnnnnnnnnnnnnnnnnnnnnnnnnnnnnnnnnnnnnnnnnnnnnnnnnnnnnnnnnnnnnnnnnnnnnnnnnnnnnnnnnnnnnnnnnnnnnnnnnnnnnnnnnnnnnnnnnnnnnnnnnnnnnnnnnnnnnnnnnnnnnnnnnnnnnnnnnnnnnnnnnnnnnnnnnnnnnnnnnnnnnnnnnnnnnnnnnnnnnnnnnnnnnnnnnnnnnnnnnnnnnnnnnnnnnnnnnnnnnnnnnnnnnnnnnnnnnnnnnnnnnnnnnnnnnnnnnnnnnnnnnnnnnnnnnnnnnnnnnnnnnnnnnnnnnnnnnnnnnnnnnnnnnnnnnnnnnnnnnnnnnnnnnnnnnnnnnnnnnnnnnnnnnnnnnnnnnnnnnnnnnnnnnnnnnnnnnnnnnnnnnnnnnnnnnnnnnnnnnnnnnnnnnnnnnnnnnnnnnnnnnnnnnnnnnnnnnnnnnnnnnnnnnnnnnnnnnnnnnnnnnnnnnnnnnnnnnnnnnnnnnnnnnnnnnnnnnnnnnnnnnnnnnnnnnnnnnnnnnnnnnnnnnnnnnnnnnnnnnnnnnnnnnnnnnnnnnnnnnnnnnnnnnnnnnnnnnnnnnnnnnnnnnnnnnnnnnnnnnnnnnnnnnnnnnnnnnnnnnnnnnnnnnnnnnnnnnnnnnnnnnnnnnnnnnnnnnnnnnnnnnnnnnnnnnnnnnnnnnnnnnnnnnnnnnnnnnnnnnnnnnnnnnnnnnnnnnnnnnnnnnnnnnnnnnnnnnnnnnnnnnnnnnnnnnnnnnnnnnnnnnnnnnnnnnnnnnnnnnnnnnnnnnnnnnnnnnnnnnnnnnnnnnnnnnnnnnnnnnnnnnnnnnnnnnnnnnnnnnnnnnnnnnnnnnnnnnnnnnnnnnnnnnnnnnnnnnnnnnnnnnnnnnnnnnnnnnnnnnnnnnnnnnnnnnnnnnnnnnnnnnnnnnnnnnnnnnnnnnnnnnnnnnnnnnnnnnnnnnnnnnnnnnnnnnnnnnnnnnnnnnnnnnnnnnnnnnnnnnnnnnnnnnnnnnnnnnnnnnnnnnnnnnnnnnnnnnnnnnnnnnnnnnnnnnnnnnnnnnnnnnnnnnnnnnnnnnnnnnnnnnnnnnnnnnnnnnnnnnnnnnnnnnnnnnnnnnnnnnnnnnnnnnnnnnnnnnnnnnnnnnnnnnnnnnnnnnnnnnnnnnnnnnnnnnnnnnnnnnnnnnnnnnnnnnnnnnnnnnnnnnnnnnnnnnnnnnnnnnnnnnnnnnnnnnnnnnnnnnnnnnnnnnnnnnnnnnnnnnnnnnnnnnnnnnnnnnnnnnnnnnnnnnnnnnnnnnnnnnnnnnnnnnnnnnnnnnnnnnnnnnnnnnnnnnnnnnnnnnnnnnnnnnnnnnnnnnnnnnnnnnnnnnnnnnnnnnnnnnnnnnnnnnnnnnnnnnnnnnnnnnnnnnnnnnnnnnnnnnnnnnnnnnnnnnnnnnnnnnnnnnnnnnnnnnnnnnnnnnnnnnnnnnnnnnnnnnnnnnnnnnnnnnnnnnnnnnnnnnnnnnnnnnnnnnnnnnnnnnnnnnnnnnnnnnnnnnnnnnnnnnnnnnnnnnnnnnnnnnnnnnnnnnnnnnnnnnnnnnnnnnnnnnnnnnnnnnnnnnnnnnnnnnnnnnnnnnnnnnnnnnnnnnnnnnnnnnnnnnnnnnnnnnnnnnnnnnnnnnnnnnnnnnnnnnnnnnnnnnnnnnnnnnnnnnnnnnnnnnnnnnnnnnnnnnnnnnnnnnnnnnnnnnnnnnnnnnnnnnnnnnnnnnnnnnnnnnnnnnnnnnnnnnnnnnnnnnnnnnnnnnnnnnnnnnnnnnnnnnnnnnnnnnnnnnnnnnnnnnnnnnnnnnnnnnnnnnnnnnnnnnnnnnnnnnnnnnnnnnnnnnnnnnnnnnnnnnnnnnnnnnnnnnnnnnnnnnnnnnnnnnnnnnnnnnnnnnnnnnnnnnnnnnnnnnnnnnnnnnnnnnnnnnnnnnnnnnnnnnnnnnnnnnnnnnnnnnnnnnnnnnnnnnnnnnnnnnnnnnnnnnnnnnnnnnnnnnnnnnnnnnnnnnnnnnnnnnnnnnnnnnnnnnnnnnnnnnnnnnnnnnnnnnnnnnnnnnnnnnnnnnnnnnnnnnnnnnnnnnnnnnnnnnnnnnnnnnnnnnnnnnnnnnnnnnnnnnnnnnnnnnnnnnnnnnnnnnnnnnnnnnnnnnnnnnnnnnnnnnnnnnnnnnnnnnnnnnnnnnnnnnnnnnnnnnnnnnnnnnnnnnnnnnnnnnnnnnnnnnnnnnnnnnnnnnnnnnnnnnnnnnnnnnnnnnnnnnnnnnnnnnnnnnnnnnnnnnnnnnnnnnnnnnnnnnnnnnnnnnnnnnnnnnnnnnnnnnnnnnnnnnnnnnnnnnnnnnnnnnnnnnnnnnnnnnnnnnnnnnnnnnnnnnnnnnnnnnnnnnnnnnnnnnnnnnnnnnnnnnnnnnnnnnnnnnnnnnnnnnnnnnnnnnnnnnnnnnnnnnnnnnnnnnnnnnnnnnnnnnnnnnnnnnnnnnnnnnnnnnnnnnnnnnnnnnnnnnnnnnnnnnnnnnnnnnnnnnnnnnnnnnnnnnnnnnnnnnnnnnnnnnnnnnnnnnnnnnnnnnnnnnnnnnnnnnnnnnnnnnnnnnnnnnnnnnnnnnnnnnnnnnnnnnnnnnnnnnnnnnnnnnnnnnnnnnnnnnnnnnnnnnnnnnnnnnnnnnnnnnnnnnnnnnnnnnnnnnnnnnnnnnnnnnnnnnnnnnnnnnnnnnnnnnnnnnnnnnnnnnnnnnnnnnnnnnnnnnnnnnnnnnnnnnnnnnnnnnnnnnnnnnnnnnnnnnnnnnnnnnnnnnnnnnnnnnnnnnnnnnnnnnnnnnnnnnnnnnnnnnnnnnnnnnnnnnnnnnnnnnnnnnnnnnnnnnnnnnnnnnnnnnnnnnnnnnnnnnnnnnnnnnnnnnnnnnnnnnnnnnnnnnnnnnnnnnnnnnnnnnnnnnnnnnnnnnnnnnnnnnnnnnnnnnnnnnnnnnnnnnnnnnnnnnnnnnnnnnnnnnnnnnnnnnnnnnnnnnnnnnnnnnnnnnnnnnnnnnnnnnnnnnnnnnnnnnnnnnnnnnnnnnnnnnnnnnnnnnnnnnnnnnnnnnnnnnnnnnnnnnnnnnnnnnnnnnnnnnnnnnnnnnnnnnnnnnnnnnnnnnnnnnnnnnnnnnnnnnnnnnnnnnnnnnnnnnnnnnnnnnnnnnnnnnnnnnnnnnnnnnnnnnnnnnnnnnnnnnnnnnnnnnnnnnnnnnnnnnnnnnnnnnnnnnnnnnnnnnnnnnnnnnnnnnnnnnnnnnnnnnnnnnnnnnnnnnnnnnnnnnnnnnnnnnnnnnnnnnnnnnnnnnnnnnnnnnnnnnnnnnnnnnnnnnnnnnnnnnnnnnnnnnnnnnnnnnnnnnnnnnnnnnnnnnnnnnnnnnnnnnnnnnnnnnnnnnnnnnnnnnnnnnnnnnnnnnnnnnnnnnnnnnnnnnnnnnnnnnnnnnnnnnnnnnnnnnnnnnnnnnnnnnnnnnnnnnnnnnnnnnnnnnnnnnnnnnnnnnnnnnnnnnnnnnnnnnnnnnnnnnnnnnnnnnnnnnnnnnnnnnnnnnnnnnnnnnnnnnnnnnnnnnnnnnnnnnnnnnnnnnnnnnnnnnnnnnnnnnnnnnnnnnnnnnnnnnnnnnnnnnnnnnnnnnnnnnnnnnnnnnnnnnnnnnnnnnnnnnnnnnnnnnnnnnnnnnnnnnnnnnnnnnnnnnnnnnnnnnnnnnnnnnnnnnnnnnnnnnnnnnnnnnnnnnnnnnnnnnnnnnnnnnnnnnnnnnnnnnnnnnnnnnnnnnnnnnnnnnnnnnnnnnnnnnnnnnnnnnnnnnnnnnnnnnnnnnnnnnnnnnnnnnnnnnnnnnnnnnnnnnnnnnnnnnnnnnnnnnnnnnnnnnnnnnnnnnnnnnnnnnnnnnnnnnnnnnnnnnnnnnnnnnnnnnnnnnnnnnnnnnnnnnnnnnnnnnnnnnnnnnnnnnnnnnnnnnnnnnnnnnnnnnnnnnnnnnnnnnnnnnnnnnnnnnnnnnnnnnnnnnnnnnnnnnnnnnnnnnnnnnnnnnnnnnnnnnnnnnnnnnnnnnnnnnnnnnnnnnnnnnnnnnnnnnnnnnnnnnnnnnnnnnnnnnnnnnnnnnnnnnnnnnnnnnnnnnnnnnnnnnnnnnnnnnnnnnnnnnnnnnnnnnnnnnnnnnnnnnnnnnnnnnnnnnnnnnnnnnnnnnnnnnnnnnnnnnnnnnnnnnnnnnnnnnnnnnnnnnnnnnnnnnnnnnnnnnnnnnnnnnnnnnnnnnnnnnnnnnnnnnnnnnnnnnnnnnnnnnnnnnnnnnnnnnnnnnnnnnnnnnnnnnnnnnnnnnnnnnnnnnnnnnnnnnnnnnnnnnnnnnnnnnnnnnnnnnnnnnnnnnnnnnnnnnnnnnnnnnnnnnnnnnnnnnnnnnnnnnnnnnnnnnnnnnnnnnnnnnnnnnnnnnnnnnnnnnnnnnnnnnnnnnnnnnnnnnnnnnnnnnnnnnnnnnnnnnnnnnnnnnnnnnnnnnnnnnnnnnnnnnnnnnnnnnnnnnnnnnnnnnnnnnnnnnnnnnnnnnnnnnnnnnnnnnnnnnnnnnnnnnnnnnnnnnnnnnnnnnnnnnnnnnnnnnnnnnnnnnnnnnnnnnnnnnnnnnnnnnnnnnnnnnnnnnnnnnnnnnnnnnnnnnnnnnnnnnnnnnnnnnnnnnnnnnnnnnnnnnnnnnnnnnnnnnnnnnnnnnnnnnnnnnnnnnnnnnnnnnnnnnnnnnnnnnnnnnnnnnnnnnnnnnnnnnnnnnnnnnnnnnnnnnnnnnnnnnnnnnnnnnnnnnnnnnnnnnnnnnnnnnnnnnnnnnnnnnnnnnnnnnnnnnnnnnnnnnnnnnnnnnnnnnnnnnnnnnnnnnnnnnnnnnnnnnnnnnnnnnnnnnnnnnnnnnnnnnnnnnnnnnnnnnnnnnnnnnnnnnnnnnnnnnnnnnnnnnnnnnnnnnnnnnnnnnnnnnnnnnnnnnnnnnnnnnnnnnnnnnnnnnnnnnnnnnnnnnnnnnnnnnnnnnnnnnnnnnnnnnnnnnnnnnnnnnnnnnnnnnnnnnnnnnnnnnnnnnnnnnnnnnnnnnnnnnnnnnnnnnnnnnnnnnnnnnnnnnnnnnnnnnnnnnnnnnnnnnnnnnnnnnnnnnnnnnnnnnnnnnnnnnnnnnnnnnnnnnnnnnnnnnnnnnnnnnnnnnnnnnnnnnnnnnnnnnnnnnnnnnnnnnnnnnnnnnnnnnnnnnnnnnnnnnnnnnnnnnnnnnnnnnnnnnnnnnnnnnnnnnnnnnnnnnnnnnnnnnnnnnnnnnnnnnnnnnnnnnnnnnnnnnnnnnnnnnnnnnnnnnnnnnnnnnnnnnnnnnnnnnnnnnnnnnnnnnnnnnnnnnnnnnnnnnnnnnnnnnnnnnnnnnnnnnnnnnnnnnnnnnnnnnnnnnnnnnnnnnnnnnnnnnnnnnnnnnnnnnnnnnnnnnnnnnnnnnnnnnnnnnnnnnnnnnnnnnnnnnnnnnnnnnnnnnnnnnnnnnnnnnnnnnnnnnnnnnnnnnnnnnnnnnnnnnnnnnnnnnnnnnnnnnnnnnnnnnnnnnnnnnnnnnnnnnnnnnnnnnnnnnnnnnnnnnnnnnnnnnnnnnnnnnnnnnnnnnnnnnnnnnnnnnnnnnnnnnnnnnnnnnnnnnnnnnnnnnnnnnnnnnnnnnnnnnnnnnnnnnnnnnnnnnnnnnnnnnnnnnnnnnnnnnnnnnnnnnnnnnnnnnnnnnnnnnnnnnnnnnnnnnnnnnnnnnnnnnnnnnnnnnnnnnnnnnnnnnnnnnnnnnnnnnnnnnnnnnnnnnnnnnnnnnnnnnnnnnnnnnnnnnnnnnnnnnnnnnnnnnnnnnnnnnnnnnnnnnnnnnnnnnnnnnnnnnnnnnnnnnnnnnnnnnnnnnnnnnnnnnnnnnnnnnnnnnnnnnnnnnnnnnnnnnnnnnnnnnnnnnnnnnnnnnnnnnnnnnnnnnnnnnnnnnnnnnnnnnnnnnnnnnnnnnnnnnnnnnnnnnnnnnnnnnnnnnnnnnnnnnnnnnnnnnnnnnnnnnnnnnnnnnnnnnnnnnnnnnnnnnnnnnnnnnnnnnnnnnnnnnnnnnnnnnnnnnnnnnnnnnnnnnnnnnnnnnnnnnnnnnnnnnnnnnnnnnnnnnnnnnnnnnnnnnnnnnnnnnnnnnnnnnnnnnnnnnnnnnnnnnnnnnnnnnnnnnnnnnnnnnnnnnnnnnnnnnnnnnnnnnnnnnnnnnnnnnnnnnnnnnnnnnnnnnnnnnnnnnnnnnnnnnnnnnnnnnnnnnnnnnnnnnnnnnnnnnnnnnnnnnnnnnnnnnnnnnnnnnnnnnnnnnnnnnnnnnnnnnnnnnnnnnnnnnnnnnnnnnnnnnnnnnnnnnnnnnnnnnnnnnnnnnnnnnnnnnnnnnnnnnnnnnnnnnnnnnnnnnnnnnnnnnnnnnnnnnnnnnnnnnnnnnnnnnnnnnnnnnnnnnnnnnnnnnnnnnnnnnnnnnnnnnnnnnnnnnnnnnnnnnnnnnnnnnnnnnnnnnnnnnnnnnnnnnnnnnnnnnnnnnnnnnnnnnnnnnnnnnnnnnnnnnnnnnnnnnnnnnnnnnnnnnnnnnnnnnnnnnnnnnnnnnnnnnnnnnnnnnnnnnnnnnnnnnnnnnnnnnnnnnnnnnnnnnnnnnnnnnnnnnnnnnnnnnnnnnnnnnnnnnnnnnnnnnnnnnnnnnnnnnnnnnnnnnnnnnnnnnnnnnnnnnnnnnnnnnnnnnnnnnnnnnnnnnnnnnnnnnnnnnnnnnnnnnnnnnnnnnnnnnnnnnnnnnnnnnnnnnnnnnnnnnnnnnnnnnnnnnnnnnnnnnnnnnnnnnnnnnnnnnnnnnnnnnnnnnnnnnnnnnnnnnnnnnnnnnnnnnnnnnnnnnnnnnnnnnnnnnnnnnnnnnnnnnnnnnnnnnnnnnnnnnnnnnnnnnnnnnnnnnnnnnnnnnnnnnnnnnnnnnnnnnnnnnnnnnnnnnnnnnnnnnnnnnnnnnnnnnnnnnnnnnnnnnnnnnnnnnnnnnnnnnnnnnnnnnnnnnnnnnnnnnnnnnnnnnnnnnnnnnnnnnnnnnnnnnnnnnnnnnnnnnnnnnnnnnnnnnnnnnnnnnnnnnnnnnnnnnnnnnnnnnnnnnnnnnnnnnnnnnnnnnnnnnnnnnnnnnnnnnnnnnnnnnnnnnnnnnnnnnnnnnnnnnnnnnnnnnnnnnnnnnnnnnnnnnnnnnnnnnnnnnnnnnnnnnnnnnnnnnnnnnnnnnnnnnnnnnnnnnnnnnnnnnnnnnnnnnnnnnnnnnnnnnnnnnnnnnnnnnnnnnnnnnnnnnnnnnnnnnnnnnnnnnnnnnnnnnnnnnnnnnnnnnnnnnnnnnnnnnnnnnnnnnnnnnnnnnnnnnnnnnnnnnnnnnnnnnnnnnnnnnnnnnnnnnnnnnnnnnnnnnnnnnnnnnnnnnnnnnnnnnnnnnnnnnnnnnnnnnnnnnnnnnnnnnnnnnnnnnnnnnnnnnnnnnnnnnnnnnnnnnnnnnnnnnnnnnnnnnnnnnnnnnnnnnnnnnnnnnnnnnnnnnnnnnnnnnnnnnnnnnnnnnnnnnnnnnnnnnnnnnnnnnnnnnnnnnnnnnnnnnnnnnnnnnnnnnnnnnnnnnnnnnnnnnnnnnnnnnnnnnnnnnnnnnnnnnnnnnnnnnnnnnnnnnnnnnnnnnnnnnnnnnnnnnnnnnnnnnnnnnnnnnnnnnnnnnnnnnnnnnnnnnnnnnnnnnnnnnnnnnnnnnnnnnnnnnnnnnnnnnnnnnnnnnnnnnnnnnnnnnnnnnnnnnnnnnnnnnnnnnnnnnnnnnnnnnnnnnnnnnnnnnnnnnnnnnnnnnnnnnnnnnnnnnnnnnnnnnnnnnnnnnnnnnnnnnnnnnnnnnnnnnnnnnnnnnnnnnnnnnnnnnnnnnnnnnnnnnnnnnnnnnnnnnnnnnnnnnnnnnnnnnnnnnnnnnnnnnnnnnnnnnnnnnnnnnnnnnnnnnnnnnnnnnnnnnnnnnnnnnnnnnnnnnnnnnnnnnnnnnnnnnnnnnnnnnnnnnnnnnnnnnnnnnnnnnnnnnnnnnnnnnnnnnnnnnnnnnnnnnnnnnnnnnnnnnnnnnnnnnnnnnnnnnnnnnnnnnnnnnnnnnnnnnnnnnnnnnnnnnnnnnnnnnnnnnnnnnnnnnnnnnnnnnnnnnnnnnnnnnnnnnnnnnnnnnnnnnnnnnnnnnnnnnnnnnnnnnnnnnnnnnnnnnnnnnnnnnnnnnnnnnnnnnnnnnnnnnnnnnnnnnnnnnnnnnnnnnnnnnnnnnnnnnnnnnnnnnnnnnnnnnnnnnnnnnnnnnnnnnnnnnnnnnnnnnnnnnnnnnnnnnnnnnnnnnnnnnnnnnnnnnnnnnnnnnnnnnnnnnnnnnnnnnnnnnnnnnnnnnnnnnnnnnnnnnnnnnnnnnnnnnnnnnnnnnnnnnnnnnnnnnnnnnnnnnnnnnnnnnnnnnnnnnnnnnnnnnnnnnnnnnnnnnnnnnnnnnnnnnnnnnnnnnnnnnnnnnnnnnnnnnnnnnnnnnnnnnnnnnnnnnnnnnnnnnnnnnnnnnnnnnnnnnnnnnnnnnnnnnnnnnnnnnnnnnnnnnnnnnnnnnnnnnnnnnnnnnnnnnnnnnnnnnnnnnnnnnnnnnnnnnnnnnnnnnnnnnnnnnnnnnnnnnnnnnnnnnnnnnnnnnnnnnnnnnnnnnnnnnnnnnnnnnnnnnnnnnnnnnnnnnnnnnnnnnnnnnnnnnnnnnnnnnnnnnnnnnnnnnnnnnnnnnnnnnnnnnnnnnnnnnnnnnnnnnnnnnnnnnnnnnnnnnnnnnnnnnnnnnnnnnnnnnnnnnnnnnnnnnnnnnnnnnnnnnnnnnnnnnnnnnnnnnnnnnnnnnnnnnnnnnnnnnnnnnnnnnnnnnnnnnnnnnnnnnnnnnnnnnnnnnnnnnnnnnnnnnnnnnnnnnnnnnnnnnnnnnnnnnnnnnnnnnnnnnnnnnnnnnnnnnnnnnnnnnnnnnnnnnnnnnnnnnnnnnnnnnnnnnnnnnnnnnnnnnnnnnnnnnnnnnnnnnnnnnnnnnnnnnnnnnnnnnnnnnnnnnnnnnnnnnnnnnnnnnnnnnnnnnnnnnnnnnnnnnnnnnnnnnnnnnnnnnnnnnnnnnnnnnnnnnnnnnnnnnnnnnnnnnnnnnnnnnnnnnnnnnnnnnnnnnnnnnnnnnnnnnnnnnnnnnnnnnnnnnnnnnnnnnnnnnnnnnnnnnnnnnnnnnnnnnnnnnnnnnnnnnnnnnnnnnnnnnnnnnnnnnnnnnnnnnnnnnnnnnnnnnnnnnnnnnnnnnnnnnnnnnnnnnnnnnnnnnnnnnnnnnnnnnnnnnnnnnnnnnnnnnnnnnnnnnnnnnnnnnnnnnnnnnnnnnnnnnnnnnnnnnnnnnnnnnnnnnnnnnnnnnnnnnnnnnnnnnnnnnnnnnnnnnnnnnnnnnnnnnnnnnnnnnnnnnnnnnnnnnnnnnnnnnnnnnnnnnnnnnnnnnnnnnnnnnnnnnnnnnnnnnnnnnnnnnnnnnnnnnnnnnnnnnnnnnnnnnnnnnnnnnnnnnnnnnnnnnnnnnnnnnnnnnnnnnnnnnnnnnnnnnnnnnnnnnnnnnnnnnnnnnnnnnnnnnnnnnnnnnnnnnnnnnnnnnnnnnnnnnnnnnnnnnnnnnnnnnnnnnnnnnnnnnnnnnnnnnnnnnnnnnnnnnnnnnnnnnnnnnnnnnnnnnnnnnnnnnnnnnnnnnnnnnnnnnnnnnnnnnnnnnnnnnnnnnnnnnnnnnnnnnnnnnnnnnnnnnnnnnnnnnnnnnnnnnnnnnnnnnnnnnnnnnnnnnnnnnnnnnnnnnnnnnnnnnnnnnnnnnnnnnnnnnnnnnnnnnnnnnnnnnnnnnnnnnnnnnnnnnnnnnnnnnnnnnnnnnnnnnnnnnnnnnnnnnnnnnnnnnnnnnnnnnnnnnnnnnnnnnnnnnnnnnnnnnnnnnnnnnnnnnnnnnnnnnnnnnnnnnnnnnnnnnnnnnnnnnnnnnnnnnnnnnnnnnnnnnnnnnnnnnnnnnnnnnnnnnnnnnnnnnnnnnnnnnnnnnnnnnnnnnnnnnnnnnnnnnnnnnnnnnnnnnnnnnnnnnnnnnnnnnnnnnnnnnnnnnnnnnnnnnnnnnnnnnnnnnnnnnnnnnnnnnnnnnnnnnnnnnnnnnnnnnnnnnnnnnnnnnnnnnnnnnnnnnnnnnnnnnnnnnnnnnnnnnnnnnnnnnnnnnnnnnnnnnnnnnnnnnnnnnnnnnnnnnnnnnnnnnnnnnnnnnnnnnnnnnnnnnnnnnnnnnnnnnnnnnnnnnnnnnnnnnnnnnnnnnnnnnnnnnnnnnnnnnnnnnnnnnnnnnnnnnnnnnnnnnnnnnnnnnnnnnnnnnnnnnnnnnnnnnnnnnnnnnnnnnnnnnnnnnnnnnnnnnnnnnnnnnnnnnnnnnnnnnnnnnnnnnnnnnnnnnnnnnnnnnnnnnnnnnnnnnnnnnnnnnnnnnnnnnnnnnnnnnnnnnnnnnnnnnnnnnnnnnnnnnnnnnnnnnnnnnnnnnnnnnnnnnnnnnnnnnnnnnnnnnnnnnnnnnnnnnnnnnnnnnnnnnnnnnnnnnnnnnnnnnnnnnnnnnnnnnnnnnnnnnnnnnnnnnnnnnnnnnnnnnnnnnnnnnnnnnnnnnnnnnnnnnnnnnnnnnnnnnnnnnnnnnnnnnnnnnnnnnnnnnnnnnnnnnnnnnnnnnnnnnnnnnnnnnnnnnnnnnnnnnnnnnnnnnnnnnnnnnnnnnnnnnnnnnnnnnnnnnnnnnnnnnnnnnnnnnnnnnnnnnnnnnnnnnnnnnnnnnnnnnnnnnnnnnnnnnnnnnnnnnnnnnnnnnnnnnnnnnnnnnnnnnnnnnnnnnnnnnnnnnnnnnnnnnnnnnnnnnnnnnnnnnnnnnnnnnnnnnnnnnnnnnnnnnnnnnnnnnnnnnnnnnnnnnnnnnnnnnnnnnnnnnnnnnnnnnnnnnnnnnnnnnnnnnnnnnnnnnnnnnnnnnnnnnnnnnnnnnnnnnnnnnnnnnnnnnnnnnnnnnnnnnnnnnnnnnnnnnnnnnnnnnnnnnnnnnnnnnnnnnnnnnnnnnnnnnnnnnnnnnnnnnnnnnnnnnnnnnnnnnnnnnnnnnnnnnnnnnnnnnnnnnnnnnnnnnnnnnnnnnnnnnnnnnnnnnnnnnnnnnnnnnnnnnnnnnnnnnnnnnnnnnnnnnnnnnnnnnnnnnnnnnnnnnnnnnnnnnnnnnnnnnnnnnnnnnnnnnnnnnnnnnnnnnnnnnnnnnnnnnnnnnnnnnnnnnnnnnnnnnnnnnnnnnnnnnnnnnnnnnnnnnnnnnnnnnnnnnnnnnnnnnnnnnnnnnnnnnnnnnnnnnnnnnnnnnnnnnnnnnnnnnnnnnnnnnnnnnnnnnnnnnnnnnnnnnnnnnnnnnnnnnnnnnnnnnnnnnnnnnnnnnnnnnnnnnnnnnnnnnnnnnnnnnnnnnnnnnnnnnnnnnnnnnnnnnnnnnnnnnnnnnnnnnnnnnnnnnnnnnnnnnnnnnnnnnnnnnnnnnnnnnnnnnnnnnnnnnnnnnnnnnnnnnnnnnnnnnnnnnnnnnnnnnnnnnnnnnnnnnnnnnnnnnnnnnnnnnnnnnnnnnnnnnnnnnnnnnnnnnnnnnnnnnnnnnnnnnnnnnnnnnnnnnnnnnnnnnnnnnnnnnnnnnnnnnnnnnnnnnnnnnnnnnnnnnnnnnnnnnnnnnnnnnnnnnnnnnnnnnnnnnnnnnnnnnnnnnnnnnnnnnnnnnnnnnnnnnnnnnnnnnnnnnnnnnnnnnnnnnnnnnnnnnnnnnnnnnnnnnnnnnnnnnnnnnnnnnnnnnnnnnnnnnnnnnnnnnnnnnnnnnnnnnnnnnnnnnnnnnnnnnnnnnnnnnnnnnnnnnnnnnnnnnnnnnnnnnnnnnnnnnnnnnnnnnnnnnnnnnnnnnnnnnnnnnnnnnnnnnnnnnnnnnnnnnnnnnnnnnnnnnnnnnnnnnnnnnnnnnnnnnnnnnnnnnnnnnnnnnnnnnnnnnnnnnnnnnnnnnnnnnnnnnnnnnnnnnnnnnnnnnnnnnnnnnnnnnnnnnnnnnnnnnnnnnnnnnnnnnnnnnnnnnnnnnnnnnnnnnnnnnnnnnnnnnnnnnnnnnnnnnnnnnnnnnnnnnnnnnnnnnnnnnnnnnnnnnnnnnnnnnnnnnnnnnnnnnnnnnnnnnnnnnnnnnnnnnnnnnnnnnnnnnnnnnnnnnnnnnnnnnnnnnnnnnnnnnnnnnnnnnnnnnnnnnnnnnnnnnnnnnnnnnnnnnnnnnnnnnnnnnnnnnnnnnnnnnnnnnnnnnnnnnnnnnnnnnnnnnnnnnnnnnnnnnnnnnnnnnnnnnnnnnnnnnnnnnnnnnnnnnnnnnnnnnnnnnnnnnnnnnnnnnnnnnnnnnnnnnnnnnnnnnnnnnnnnnnnnnnnnnnnnnnnnnnnnnnnnnnnnnnnnnnnnnnnnnnnnnnnnnnnnnnnnnnnnnnnnnnnnnnnnnnnnnnnnnnnnnnnnnnnnnnnnnnnnnnnnnnnnnnnnnnnnnnnnnnnnnnnnnnnnnnnnnnnnnnnnnnnnnnnnnnnnnnnnnnnnnnnnnnnnnnnnnnnnnnnnnnnnnnnnnnnnnnnnnnnnnnnnnnnnnnnnnnnnnnnnnnnnnnnnnnnnnnnnnnnnnnnnnnnnnnnnnnnnnnnnnnnnnnnnnnnnnnnnnnnnnnnnnnnnnnnnnnnnnnnnnnnnnnnnnnnnnnnnnnnnnnnnnnnnnnnnnnnnnnnnnnnnnnnnnnnnnnnnnnnnnnnnnnnnnnnnnnnnnnnnnnnnnnnnnnnnnnnnnnnnnnnnnnnnnnnnnnnnnnnnnnnnnnnnnnnnnnnnnnnnnnnnnnnnnnnnnnnnnnnnnnnnnnnnnnnnnnnnnnnnnnnnnnnnnnnnnnnnnnnnnnnnnnnnnnnnnnnnnnnnnnnnnnnnnnnnnnnnnnnnnnnnnnnnnnnnnnnnnnnnnnnnnnnnnnnnnnnnnnnnnnnnnnnnnnnnnnnnnnnnnnnnnnnnnnnnnnnnnnnnnnnnnnnnnnnnnnnnnnnnnnnnnnnnnnnnnnnnnnnnnnnnnnnnnnnnnnnnnnnnnnnnnnnnnnnnnnnnnnnnnnnnnnnnnnnnnnnnnnnnnnnnnnnnnnnnnnnnnnnnnnnnnnnnnnnnnnnnnnnnnnnnnnnnnnnnnnnnnnnnnnnnnnnnnnnnnnnnnnnnnnnnnnnnnnnnnnnnnnnnnnnnnnnnnnnnnnnnnnnnnnnnnnnnnnnnnnnnnnnnnnnnnnnnnnnnnnnnnnnnnnnnnnnnnnnnnnnnnnnnnnnnnnnnnnnnnnnnnnnnnnnnnnnnnnnnnnnnnnnnnnnnnnnnnnnnnnnnnnnnnnnnnnnnnnnnnnnnnnnnnnnnnnnnnnnnnnnnnnnnnnnnnnnnnnnnnnnnnnnnnnnnnnnnnnnnnnnnnnnnnnnnnnnnnnnnnnnnnnnnnnnnnnnnnnnnnnnnnnnnnnnnnnnnnnnnnnnnnnnnnnnnnnnnnnnnnnnnnnnnnnnnnnnnnnnnnnnnnnnnnnnnnnnnnnnnnnnnnnnnnnnnnnnnnnnnnnnnnnnnnnnnnnnnnnnnnnnnnnnnnnnnnnnnnnnnnnnnnnnnnnnnnnnnnnnnnnnnnnnnnnnnnnnnnnnnnnnnnnnnnnnnnnnnnnnnnnnnnnnnnnnnnnnnnnnnnnnnnnnnnnnnnnnnnnnnnnnnnnnnnnnnnnnnnnnnnnnnnnnnnnnnnnnnnnnnnnnnnnnnnnnnnnnnnnnnnnnnnnnnnnnnnnnnnnnnnnnnnnnnnnnnnnnnnnnnnnnnnnnnnnnnnnnnnnnnnnnnnnnnnnnnnnnnnnnnnnnnnnnnnnnnnnnnnnnnnnnnnnnnnnnnnnnnnnnnnnnnnnnnnnnnnnnnnnnnnnnnnnnnnnnnnnnnnnnnnnnnnnnnnnnnnnnnnnnnnnnnnnnnnnnnnnnnnnnnnnnnnnnnnnnnnnnnnnnnnnnnnnnnnnnnnnnnnnnnnnnnnnnnnnnnnnnnnnnnnnnnnnnnnnnnnnnnnnnnnnnnnnnnnnnnnnnnnnnnnnnnnnnnnnnnnnnnnnnnnnnnnnnnnnnnnnnnnnnnnnnnnnnnnnnnnnnnnnnnnnnnnnnnnnnnnnnnnnnnnnnnnnnnnnnnnnnnnnnnnnnnnnnnnnnnnnnnnnnnnnnnnnnnnnnnnnnnnnnnnnnnnnnnnnnnnnnnnnnnnnnnnnnnnnnnnnnnnnnnnnnnnnnnnnnnnnnnnnnnnnnnnnnnnnnnnnnnnnnnnnnnnnnnnnnnnnnnnnnnnnnnnnnnnnnnnnnnnnnnnnnnnnnnnnnnnnnnnnnnnnnnnnnnnnnnnnnnnnnnnnnnnnnnnnnnnnnnnnnnnnnnnnnnnnnnnnnnnnnnnnnnnnnnnnnnnnnnnnnnnnnnnnnnnnnnnnnnnnnnnnnnnnnnnnnnnnnnnnnnnnnnnnnnnnnnnnnnnnnnnnnnnnnnnnnnnnnnnnnnnnnnnnnnnnnnnnnnnnnnnnnnnnnnnnnnnnnnnnnnnnnnnnnnnnnnnnnnnnnnnnnnnnnnnnnnnnnnnnnnnnnnnnnnnnnnnnnnnnnnnnnnnnnnnnnnnnnnnnnnnnnnnnnnnnnnnnnnnnnnnnnnnnnnnnnnnnnnnnnnnnnnnnnnnnnnnnnnnnnnnnnnnnnnnnnnnnnnnnnnnnnnnnnnnnnnnnnnnnnnnnnnnnnnnnnnnnnnnnnnnnnnnnnnnnnnnnnnnnnnnnnnnnnnnnnnnnnnnnnnnnnnnnnnnnnnnnnnnnnnnnnnnnnnnnnnnnnnnnnnnnnnnnnnnnnnnnnnnnnnnnnnnnnnnnnnnnnnnnnnnnnnnnnnnnnnnnnnnnnnnnnnnnnnnnnnnnnnnnnnnnnnnnnnnnnnnnnnnnnnnnnnnnnnnnnnnnnnnnnnnnnnnnnnnnnnnnnnnnnnnnnnnnnnnnnnnnnnnnnnnnnnnnnnnnnnnnnnnnnnnnnnnnnnnnnnnnnnnnnnnnnnnnnnnnnnnnnnnnnnnnnnnnnnnnnnnnnnnnnnnnnnnnnnnnnnnnnnnnnnnnnnnnnnnnnnnnnnnnnnnnnnnnnnnnnnnnnnnnnnnnnnnnnnnnnnnnnnnnnnnnnnnnnnnnnnnnnnnnnnnnnnnnnnnnnnnnnnnnnnnnnnnnnnnnnnnnnnnnnnnnnnnnnnnnnnnnnnnnnnnnnnnnnnnnnnnnnnnnnnnnnnnnnnnnnnnnnnnnnnnnnnnnnnnnnnnnnnnnnnnnnnnnnnnnnnnnnnnnnnnnnnnnnnnnnnnnnnnnnnnnnnnnnnnnnnnnnnnnnnnnnnnnnnnnnnnnnnnnnnnnnnnnnnnnnnnnnnnnnnnnnnnnnnnnnnnnnnnnnnnnnnnnnnnnnnnnnnnnnnnnnnnnnnnnnnnnnnnnnnnnnnnnnnnnnnnnnnnnnnnnnnnnnnnnnnnnnnnnnnnnnnnnnnnnnnnnnnnnnnnnnnnnnnnnnnnnnnnnnnnnnnnnnnnnnnnnnnnnnnnnnnnnnnnnnnnnnnnnnnnnnnnnnnnnnnnnnnnnnnnnnnnnnnnnnnnnnnnnnnnnnnnnnnnnnnnnnnnnnnnnnnnnnnnnnnnnnnnnnnnnnnnnnnnnnnnnnnnnnnnnnnnnnnnnnnnnnnnnnnnnnnnnnnnnnnnnnnnnnnnnnnnnnnnnnnnnnnnnnnnnnnnnnnnnnnnnnnnnnnnnnnnnnnnnnnnnnnnnnnnnnnnnnnnnnnnnnnnnnnnnnnnnnnnnnnnnnnnnnnnnnnnnnnnnnnnnnnnnnnnnnnnnnnnnnnnnnnnnnnnnnnnnnnnnnnnnnnnnnnnnnnnnnnnnnnnnnnnnnnnnnnnnnnnnnnnnnnnnnnnnnnnnnnnnnnnnnnnnnnnnnnnnnnnnnnnnnnnnnnnnnnnnnnnnnnnnnnnnnnnnnnnnnnnnnnnnnnnnnnnnnnnnnnnnnnnnnnnnnnnnnnnnnnnnnnnnnnnnnnnnnnnnnnnnnnnnnnnnnnnnnnnnnnnnnnnnnnnnnnnnnnnnnnnnnnnnnnnnnnnnnnnnnnnnnnnnnnnnnnnnnnnnnnnnnnnnnnnnnnnnnnnnnnnnnnnnnnnnnnnnnnnnnnnnnnnnnnnnnnnnnnnnnnnnnnnnnnnnnnnnnnnnnnnnnnnnnnnnnnnnnnnnnnnnnnnnnnnnnnnnnnnnnnnnnnnnnnnnnnnnnnnnnnnnnnnnnnnnnnnnnnnnnnnnnnnnnnnnnnnnnnnnnnnnnnnnnnnnnnnnnnnnnnnnnnnnnnnnnnnnnnnnnnnnnnnnnnnnnnnnnnnnnnnnnnnnnnnnnnnnnnnnnnnnnnnnnnnnnnnnnnnnnnnnnnnnnnnnnnnnnnnnnnnnnnnnnnnnnnnnnnnnnnnnnnnnnnnnnnnnnnnnnnnnnnnnnnnnnnnnnnnnnnnnnnnnnnnnnnnnnnnnnnnnnnnnnnnnnnnnnnnnnnnnnnnnnnnnnnnnnnnnnnnnnnnnnnnnnnnnnnnnnnnnnnnnnnnnnnnnnnnnnnnnnnnnnnnnnnnnnnnnnnnnnnnnnnnnnnnnnnnnnnnnnnnnnnnnnnnnnnnnnnnnnnnnnnnnnnnnnnnnnnnnnnnnnnnnnnnnnnnnnnnnnnnnnnnnnnnnnnnnnnnnnnnnnnnnnnnnnnnnnnnnnnnnnnnnnnnnnnnnnnnnnnnnnnnnnnnnnnnnnnnnnnnnnnnnnnnnnnnnnnnnnnnnnnnnnnnnnnnnnnnnnnnnnnnnnnnnnnnnnnnnnnnnnnnnnnnnnnnnnnnnnnnnnnnnnnnnnnnnnnnnnnnnnnnnnnnnnnnnnnnnnnnnnnnnnnnnnnnnnnnnnnnnnnnnnnnnnnnnnnnnnnnnnnnnnnnnnnnnnnnnnnnnnnnnnnnnnnnnnnnnnnnnnnnnnnnnnnnnnnnnnnnnnnnnnnnnnnnnnnnnnnnnnnnnnnnnnnnnnnnnnnnnnnnnnnnnnnnnnnnnnnnnnnnnnnnnnnnnnnnnnnnnnnnnnnnnnnnnnnnnnnnnnnnnnnnnnnnnnnnnnnnnnnnnnnnnnnnnnnnnnnnnnnnnnnnnnnnnnnnnnnnnnnnnnnnnnnnnnnnnnnnnnnnnnnnnnnnnnnnnnnnnnnnnnnnnnnnnnnnnnnnnnnnnnnnnnnnnnnnnnnnnnnnnnnnnnnnnnnnnnnnnnnnnnnnnnnnnnnnnnnnnnnnnnnnnnnnnnnnnnnnnnnnnnnnnnnnnnnnnnnnnnnnnnnnnnnnnnnnnnnnnnnnnnnnnnnnnnnnnnnnnnnnnnnnnnnnnnnnnnnnnnnnnnnnnnnnnnnnnnnnnnnnnnnnnnnnnnnnnnnnnnnnnnnnnnnnnnnnnnnnnnnnnnnnnnnnnnnnnnnnnnnnnnnnnnnnnnnnnnnnnnnnnnnnnnnnnnnnnnnnnnnnnnnnnnnnnnnnnnnnnnnnnnnnnnnnnnnnnnnnnnnnnnnnnnnnnnnnnnnnnnnnnnnnnnnnnnnnnnnnnnnnnnnnnnnnnnnnnnnnnnnnnnnnnnnnnnnnnnnnnnnnnnnnnnnnnnnnnnnnnnnnnnnnnnnnnnnnnnnnnnnnnnnnnnnnnnnnnnnnnnnnnnnnnnnnnnnnnnnnnnnnnnnnnnnnnnnnnnnnnnnnnnnnnnnnnnnnnnnnnnnnnnnnnnnnnnnnnnnnnnnnnnnnnnnnnnnnnnnnnnnnnnnnnnnnnnnnnnnnnnnnnnnnnnnnnnnnnnnnnnnnnnnnnnnnnnnnnnnnnnnnnnnnnnnnnnnnnnnnnnnnnnnnnnnnnnnnnnnnnnnnnnnnnnnnnnnnnnnnnnnnnnnnnnnnnnnnnnnnnnnnnnnnnnnnnnnnnnnnnnnnnnnnnnnnnnnnnnnnnnnnnnnnnnnnnnnnnnnnnnnnnnnnnnnnnnnnnnnnnnnnnnnnnnnnnnnnnnnnnnnnnnnnnnnnnnnnnnnnnnnnnnnnnnnnnnnnnnnnnnnnnnnnnnnnnnnnnnnnnnnnnnnnnnnnnnnnnnnnnnnnnnnnnnnnnnnnnnnnnnnnnnnnnnnnnnnnnnnnnnnnnnnnnnnnnnnnnnnnnnnnnnnnnnnnnnnnnnnnnnnnnnnnnnnnnnnnnnnnnnnnnnnnnnnnnnnnnnnnnnnnnnnnnnnnnnnnnnnnnnnnnnnnnnnnnnnnnnnnnnnnnnnnnnnnnnnnnnnnnnnnnnnnnnnnnnnnnnnnnnnnnnnnnnnnnnnnnnnnnnnnnnnnnnnnnnnnnnnnnnnnnnnnnnnnnnnnnnnnnnnnnnnnnnnnnnnnnnnnnnnnnnnnnnnnnnnnnnnnnnnnnnnnnnnnnnnnnnnnnnnnnnnnnnnnnnnnnnnnnnnnnnnnnnnnnnnnnnnnnnnnnnnnnnnnnnnnnnnnnnnnnnnnnnnnnnnnnnnnnnnnnnnnnnnnnnnnnnnnnnnnnnnnnnnnnnnnnnnnnnnnnnnnnnnnnnnnnnnnnnnnnnnnnnnnnnnnnnnnnnnnnnnnnnnnnnnnnnnnnnnnnnnnnnnnnnnnnnnnnnnnnnnnnnnnnnnnnnnnnnnnnnnnnnnnnnnnnnnnnnnnnnnnnnnnnnnnnnnnnnnnnnnnnnnnnnnnnnnnnnnnnnnnnnnnnnnnnnnnnnnnnnnnnnnnnnnnnnnnnnnnnnnnnnnnnnnnnnnnnnnnnnnnnnnnnnnnnnnnnnnnnnnnnnnnnnnnnnnnnnnnnnnnnnnnnnnnnnnnnnnnnnnnnnnnnnnnnnnnnnnnnnnnnnnnnnnnnnnnnnnnnnnnnnnnnnnnnnnnnnnnnnnnnnnnnnnnnnnnnnnnnnnnnnnnnnnnnnnnnnnnnnnnnnnnnnnnnnnnnnnnnnnnnnnnnnnnnnnnnnnnnnnnnnnnnnnnnnnnnnnnnnnnnnnnnnnnnnnnnnnnnnnnnnnnnnnnnnnnnnnnnnnnnnnnnnnnnnnnnnnnnnnnnnnnnnnnnnnnnnnnnnnnnnnnnnnnnnnnnnnnnnnnnnnnnnnnnnnnnnnnnnnnnnnnnnnnnnnnnnnnnnnnnnnnnnnnnnnnnnnnnnnnnnnnnnnnnnnnnnnnnnnnnnnnnnnnnnnnnnnnnnnnnnnnnnnnnnnnnnnnnnnnnnnnnnnnnnnnnnnnnnnnnnnnnnnnnnnnnnnnnnnnnnnnnnnnnnnnnnnnnnnnnnnnnnnnnnnnnnnnnnnnnnnnnnnnnnnnnnnnnnnnnnnnnnnnnnnnnnnnnnnnnnnnnnnnnnnnnnnnnnnnnnnnnnnnnnnnnnnnnnnnnnnnnnnnnnnnnnnnnnnnnnnnnnnnnnnnnnnnnnnnnnnnnnnnnnnnnnnnnnnnnnnnnnnnnnnnnnnnnnnnnnnnnnnnnnnnnnnnnnnnnnnnnnnnnnnnnnnnnnnnnnnnnnnnnnnnnnnnnnnnnnnnnnnnnnnnnnnnnnnnnnnnnnnnnnnnnnnnnnnnnnnnnnnnnnnnnnnnnnnnnnnnnnnnnnnnnnnnnnnnnnnnnnnnnnnnnnnnnnnnnnnnnnnnnnnnnnnnnnnnnnnnnnnnnnnnnnnnnnnnnnnnnnnnnnnnnnnnnnnnnnnnnnnnnnnnnnnnnnnnnnnnnnnnnnnnnnnnnnnnnnnnnnnnnnnnnnnnnnnnnnnnnnnnnnnnnnnnnnnnnnnnnnnnnnnnnnnnnnnnnnnnnnnnnnnnnnnnnnnnnnnnnnnnnnnnnnnnnnnnnnnnnnnnnnnnnnnnnnnnnnnnnnnnnnnnnnnnnnnnnnnnnnnnnnnnnnnnnnnnnnnnnnnnnnnnnnnnnnnnnnnnnnnnnnnnnnnnnnnnnnnnnnnnnnnnnnnnnnnnnnnnnnnnnnnnnnnnnnnnnnnnnnnnnnnnnnnnnnnnnnnnnnnnnnnnnnnnnnnnnnnnnnnnnnnnnnnnnnnnnnnnnnnnnnnnnnnnnnnnnnnnnnnnnnnnnnnnnnnnnnnnnnnnnnnnnnnnnnnnnnnnnnnnnnnnnnnnnnnnnnnnnnnnnnnnnnnnnnnnnnnnnnnnnnnnnnnnnnnnnnnnnnnnnnnnnnnnnnnnnnnnnnnnnnnnnnnnnnnnnnnnnnnnnnnnnnnnnnnnnnnnnnnnnnnnnnnnnnnnnnnnnnnnnnnnnnnnnnnnnnnnnnnnnnnnnnnnnnnnnnnnnnnnnnnnnnnnnnnnnnnnnnnnnnnnnnnnnnnnnnnnnnnnnnnnnnnnnnnnnnnnnnnnnnnnnnnnnnnnnnnnnnnnnnnnnnnnnnnnnnnnnnnnnnnnnnnnnnnnnnnnnnnnnnnnnnnnnnnnnnnnnnnnnnnnnnnnnnnnnnnnnnnnnnnnnnnnnnnnnnnnnnnnnnnnnnnnnnnnnnnnnnnnnnnnnnnnnnnnnnnnnnnnnnnnnnnnnnnnnnnnnnnnnnnnnnnnnnnnnnnnnnnnnnnnnnnnnnnnnnnnnnnnnnnnnnnnnnnnnnnnnnnnnnnnnnnnnnnnnnnnnnnnnnnnnnnnnnnnnnnnnnnnnnnnnnnnnnnnnnnnnnnnnnnnnnnnnnnnnnnnnnnnnnnnnnnnnnnnnnnnnnnnnnnnnnnnnnnnnnnnnnnnnnnnnnnnnnnnnnnnnnnnnnnnnnnnnnnnnnnnnnnnnnnnnnnnnnnnnnnnnnnnnnnnnnnnnnnnnnnnnnnnnnnnnnnnnnnnnnnnnnnnnnnnnnnnnnnnnnnnnnnnnnnnnnnnnnnnnnnnnnnnnnnnnnnnnnnnnnnnnnnnnnnnnnnnnnnnnnnnnnnnnnnnnnnnnnnnnnnnnnnnnnnnnnnnnnnnnnnnnnnnnnnnnnnnnnnnnnnnnnnnnnnnnnnnnnnnnnnnnnnnnnnnnnnnnnnnnnnnnnnnnnnnnnnnnnnnnnnnnnnnnnnnnnnnnnnnnnnnnnnnnnnnnnnnnnnnnnnnnnnnnnnnnnnnnnnnnnnnnnnnnnnnnnnnnnnnnnnnnnnnnnnnnnnnnnnnnnnnnnnnnnnnnnnnnnnnnnnnnnnnnnnnnnnnnnnnnnnnnnnnnnnnnnnnnnnnnnnnnnnnnnnnnnnnnnnnnnnnnnnnnnnnnnnnnnnnnnnnnnnnnnnnnnnnnnnnnnnnnnnnnnnnnnnnnnnnnnnnnnnnnnnnnnnnnnnnnnnnnnnnnnnnnnnnnnnnnnnnnnnnnnnnnnnnnnnnnnnnnnnnnnnnnnnnnnnnnnnnnnnnnnnnnnnnnnnnnnnnnnnnnnnnnnnnnnnnnnnnnnnnnnnnnnnnnnnnnnnnnnnnnnnnnnnnnnnnnnnnnnnnnnnnnnnnnnnnnnnnnnnnnnnnnnnnnnnnnnnnnnnnnnnnnnnnnnnnnnnnnnnnnnnnnnnnnnnnnnnnnnnnnnnnnnnnnnnnnnnnnnnnnnnnnnnnnnnnnnnnnnnnnnnnnnnnnnnnnnnnnnnnnnnnnnnnnnnnnnnnnnnnnnnnnnnnnnnnnnnnnnnnnnnnnnnnnnnnnnnnnnnnnnnnnnnnnnnnnnnnnnnnnnnnnnnnnnnnnnnnnnnnnnnnnnnnnnnnnnnnnnnnnnnnnnnnnnnnnnnnnnnnnnnnnnnnnnnnnnnnnnnnnnnnnnnnnnnnnnnnnnnnnnnnnnnnnnnnnnnnnnnnnnnnnnnnnnnnnnnnnnnnnnnnnnnnnnnnnnnnnnnnnnnnnnnnnnnnnnnnnnnnnnnnnnnnnnnnnnnnnnnnnnnnnnnnnnnnnnnnnnnnnnnnnnnnnnnnnnnnnnnnnnnnnnnnnnnnnnnnnnnnnnnnnnnnnnnnnnnnnnnnnnnnnnnnnnnnnnnnnnnnnnnnnnnnnnnnnnnnnnnnnnnnnnnnnnnnnnnnnnnnnnnnnnnnnnnnnnnnnnnnnnnnnnnnnnnnnnnnnnnnnnnnnnnnnnnnnnnnnnnnnnnnnnnnnnnnnnnnnnnnnnnnnnnnnnnnnnnnnnnnnnnnnnnnnnnnnnnnnnnnnnnnnnnnnnnnnnnnnnnnnnnnnnnnnnnnnnnnnnnnnnnnnnnnnnnnnnnnnnnnnnnnnnnnnnnnnnnnnnnnnnnnnnnnnnnnnnnnnnnnnnnnnnnnnnnnnnnnnnnnnnnnnnnnnnnnnnnnnnnnnnnnnnnnnnnnnnnnnnnnnnnnnnnnnnnnnnnnnnnnnnnnnnnnnnnnnnnnnnnnnnnnnnnnnnnnnnnnnnnnnnnnnnnnnnnnnnnnnnnnnnnnnnnnnnnnnnnnnnnnnnnnnnnnnnnnnnnnnnnnnnnnnnnnnnnnnnnnnnnnnnnnnnnnnnnnnnnnnnnnnnnnnnnnnnnnnnnnnnnnnnnnnnnnnnnnnnnnnnnnnnnnnnnnnnnnnnnnnnnnnnnnnnnnnnnnnnnnnnnnnnnnnnnnnnnnnnnnnnnnnnnnnnnnnnnnnnnnnnnnnnnnnnnnnnnnnnnnnnnnnnnnnnnnnnnnnnnnnnnnnnnnnnnnnnnnnnnnnnnnnnnnnnnnnnnnnnnnnnnnnnnnnnnnnnnnnnnnnnnnnnnnnnnnnnnnnnnnnnnnnnnnnnnnnnnnnnnnnnnnnnnnnnnnnnnnnnnnnnnnnnnnnnnnnnnnnnnnnnnnnnnnnnnnnnnnnnnnnnnnnnnnnnnnnnnnnnnnnnnnnnnnnnnnnnnnnnnnnnnnnnnnnnnnnnnnnnnnnnnnnnnnnnnnnnnnnnnnnnnnnnnnnnnnnnnnnnnnnnnnnnnnnnnnnnnnnnnnnnnnnnnnnnnnnnnnnnnnnnnnnnnnnnnnnnnnnnnnnnnnnnnnnnnnnnnnnnnnnnnnnnnnnnnnnnnnnnnnnnnnnnnnnnnnnnnnnnnnnnnnnnnnnnnnnnnnnnnnnnnnnnnnnnnnnnnnnnnnnnnnnnnnnnnnnnnnnnnnnnnnnnnnnnnnnnnnnnnnnnnnnnnnnnnnnnnnnnnnnnnnnnnnnnnnnnnnnnnnnnnnnnnnnnnnnnnnnnnnnnnnnnnnnnnnnnnnnnnnnnnnnnnnnnnnnnnnnnnnnnnnnnnnnnnnnnnnnnnnnnnnnnnnnnnnnnnnnnnnnnnnnnnnnnnnnnnnnnnnnnnnnnnnnnnnnnnnnnnnnnnnnnnnnnnnnnnnnnnnnnnnnnnnnnnnnnnnnnnnnnnnnnnnnnnnnnnnnnnnnnnnnnnnnnnnnnnnnnnnnnnnnnnnnnnnnnnnnnnnnnnnnnnnnnnnnnnnnnnnnnnnnnnnnnnnnnnnnnnnnnnnnnnnnnnnnnnnnnnnnnnnnnnnnnnnnnnnnnnnnnnnnnnnnnnnnnnnnnnnnnnnnnnnnnnnnnnnnnnnnnnnnnnnnnnnnnnnnnnnnnnnnnnnnnnnnnnnnnnnnnnnnnnnnnnnnnnnnnnnnnnnnnnnnnnnnnnnnnnnnnnnnnnnnnnnnnnnnnnnnnnnnnnnnnnnnnnnnnnnnnnnnnnnnnnnnnnnnnnnnnnnnnnnnnnnnnnnnnnnnnnnnnnnnnnnnnnnnnnnnnnnnnnnnnnnnnnnnnnnnnnnnnnnnnnnnnnnnnnnnnnnnnnnnnnnnnnnnnnnnnnnnnnnnnnnnnnnnnnnnnnnnnnnnnnnnnnnnnnnnnnnnnnnnnnnnnnnnnnnnnnnnnnnnnnnnnnnnnnnnnnnnnnnnnnnnnnnnnnnnnnnnnnnnnnnnnnnnnnnnnnnnnnnnnnnnnnnnnnnnnnnnnnnnnnnnnnnnnnnnnnnnnnnnnnnnnnnnnnnnnnnnnnnnnnnnnnnnnnnnnnnnnnnnnnnnnnnnnnnnnnnnnnnnnnnnnnnnnnnnnnnnnnnnnnnnnnnnnnnnnnnnnnnnnnnnnnnnnnnnnnnnnnnnnnnnnnnnnnnnnnnnnnnnnnnnnnnnnnnnnnnnnnnnnnnnnnnnnnnnnnnnnnnnnnnnnnnnnnnnnnnnnnnnnnnnnnnnnnnnnnnnnnnnnnnnnnnnnnnnnnnnnnnnnnnnnnnnnnnnnnnnnnnnnnnnnnnnnnnnnnnnnnnnnnnnnnnnnnnnnnnnnnnnnnnnnnnnnnnnnnnnnnnnnnnnnnnnnnnnnnnnnnnnnnnnnnnnnnnnnnnnnnnnnnnnnnnnnnnnnnnnnnnnnnnnnnnnnnnnnnnnnnnnnnnnnnnnnnnnnnnnnnnnnnnnnnnnnnnnnnnnnnnnnnnnnnnnnnnnnnnnnnnnnnnnnnnnnnnnnnnnnnnnnnnnnnnnnnnnnnnnnnnnnnnnnnnnnnnnnnnnnnnnnnnnnnnnnnnnnnnnnnnnnnnnnnnnnnnnnnnnnnnnnnnnnnnnnnnnnnnnnnnnnnnnnnnnnnnnnnnnnnnnnnnnnnnnnnnnnnnnnnnnnnnnnnnnnnnnnnnnnnnnnnnnnnnnnnnnnnnnnnnnnnnnnnnnnnnnnnnnnnnnnnnnnnnnnnnnnnnnnnnnnnnnnnnnnnnnnnnnnnnnnnnnnnnnnnnnnnnnnnnnnnnnnnnnnnnnnnnnnnnnnnnnnnnnnnnnnnnnnnnnnnnnnnnnnnnnnnnnnnnnnnnnnnnnnnnnnnnnnnnnnnnnnnnnnnnnnnnnnnnnnnnnnnnnnnnnnnnnnnnnnnnnnnnnnnnnnnnnnnnnnnnnnnnnnnnnnnnnnnnnnnnnnnnnnnnnnnnnnnnnnnnnnnnnnnnnnnnnnnnnnnnnnnnnnnnnnnnnnnnnnnnnnnnnnnnnnnnnnnnnnnnnnnnnnnnnnnnnnnnnnnnnnnnnnnnnnnnnnnnnnnnnnnnnnnnnnnnnnnnnnnnnnnnnnnnnnnnnnnnnnnnnnnnnnnnnnnnnnnnnnnnnnnnnnnnnnnnnnnnnnnnnnnnnnnnnnnnnnnnnnnnnnnnnnnnnnnnnnnnnnnnnnnnnnnnnnnnnnnnnnnnnnnnnnnnnnnnnnnnnnnnnnnnnnnnnnnnnnnnnnnnnnnnnnnnnnnnnnnnnnnnnnnnnnnnnnnnnnnnnnnnnnnnnnnnnnnnnnnnnnnnnnnnnnnnnnnnnnnnnnnnnnnnnnnnnnnnnnnnnnnnnnnnnnnnnnnnnnnnnnnnnnnnnnnnnnnnnnnnnnnnnnnnnnnnnnnnnnnnnnnnnnnnnnnnnnnnnnnnnnnnnnnnnnnnnnnnnnnnnnnnnnnnnnnnnnnnnnnnnnnnnnnnnnnnnnnnnnnnnnnnnnnnnnnnnnnnnnnnnnnnnnnnnnnnnnnnnnnnnnnnnnnnnnnnnnnnnnnnnnnnnnnnnnnnnnnnnnnnnnnnnnnnnnnnnnnnnnnnnnnnnnnnnnnnnnnnnnnnnnnnnnnnnnnnnnnnnnnnnnnnnnnnnnnnnnnnnnnnnnnnnnnnnnnnnnnnnnnnnnnnnnnnnnnnnnnnnnnnnnnnnnnnnnnnnnnnnnnnnnnnnnnnnnnnnnnnnnnnnnnnnnnnnnnnnnnnnnnnnnnnnnnnnnnnnnnnnnnnnnnnnnnnnnnnnnnnnnnnnnnnnnnnnnnnnnnnnnnnnnnnnnnnnnnnnnnnnnnnnnnnnnnnnnnnnnnnnnnnnnnnnnnnnnnnnnnnnnnnnnnnnnnnnnnnnnnnnnnnnnnnnnnnnnnnnnnnnnnnnnnnnnnnnnnnnnnnnnnnnnnnnnnnnnnnnnnnnnnnnnnnnnnnnnnnnnnnnnnnnnnnnnnnnnnnnnnnnnnnnnnnnnnnnnnnnnnnnnnnnnnnnnnnnnnnnnnnnnnnnnnnnnnnnnnnnnnnnnnnnnnnnnnnnnnnnnnnnnnnnnnnnnnnnnnnnnnnnnnnnnnnnnnnnnnnnnnnnnnnnnnnnnnnnnnnnnnnnnnnnnnnnnnnnnnnnnnnnnnnnnnnnnnnnnnnnnnnnnnnnnnnnnnnnnnnnnnnnnnnnnnnnnnnnnnnnnnnnnnnnnnnnnnnnnnnnnnnnnnnnnnnnnnnnnnnnnnnnnnnnnnnnnnnnnnnnnnnnnnnnnnnnnnnnnnnnnnnnnnnnnnnnnnnnnnnnnnnnnnnnnnnnnnnnnnnnnnnnnnnnnnnnnnnnnnnnnnnnnnnnnnnnnnnnnnnnnnnnnnnnnnnnnnnnnnnnnnnnnnnnnnnnnnnnnnnnnnnnnnnnnnnnnnnnnnnnnnnnnnnnnnnnnnnnnnnnnnnnnnnnnnnnnnnnnnnnnnnnnnnnnnnnnnnnnnnnnnnnnnnnnnnnnnnnnnnnnnnnnnnnnnnnnnnnnnnnnnnnnnnnnnnnnnnnnnnnnnnnnnnnnnnnnnnnnnnnnnnnnnnnnnnnnnnnnnnnnnnnnnnnnnnnnnnnnnnnnnnnnnnnnnnnnnnnnnnnnnnnnnnnnnnnnnnnnnnnnnnnnnnnnnnnnnnnnnnnnnnnnnnnnnnnnnnnnnnnnnnnnnnnnnnnnnnnnnnnnnnnnnnnnnnnnnnnnnnnnnnnnnnnnnnnnnnnnnnnnnnnnnnnnnnnnnnnnnnnnnnnnnnnnnnnnnnnnnnnnnnnnnnnnnnnnnnnnnnnnnnnnnnnnnnnnnnnnnnnnnnnnnnnnnnnnnnnnnnnnnnnnnnnnnnnnnnnnnnnnnnnnnnnnnnnnnnnnnnnnnnnnnnnnnnnnnnnnnnnnnnnnnnnnnnnnnnnnnnnnnnnnnnnnnnnnnnnnnnnnnnnnnnnnnnnnnnnnnnnnnnnnnnnnnnnnnnnnnnnnnnnnnnnnnnnnnnnnnnnnnnnnnnnnnnnnnnnnnnnnnnnnnnnnnnnnnnnnnnnnnnnnnnnnnnnnnnnnnnnnnnnnnnnnnnnnnnnnnnnnnnnnnnnnnnnnnnnnnnnnnnnnnnnnnnnnnnnnnnnnnnnnnnnnnnnnnnnnnnnnnnnnnnnnnnnnnnnnnnnnnnnnnnnnnnnnnnnnnnnnnnnnnnnnnnnnnnnnnnnnnnnnnnnnnnnnnnnnnnnnnnnnnnnnnnnnnnnnnnnnnnnnnnnnnnnnnnnnnnnnnnnnnnnnnnnnnnnnnnnnnnnnnnnnnnnnnnnnnnnnnnnnnnnnnnnnnnnnnnnnnnnnnnnnnnnnnnnnnnnnnnnnnnnnnnnnnnnnnnnnnnnnnnnnnnnnnnnnnnnnnnnnnnnnnnnnnnnnnnnnnnnnnnnnnnnnnnnnnnnnnnnnnnnnnnnnnnnnnnnnnnnnnnnnnnnnnnnnnnnnnnnnnnnnnnnnnnnnnnnnnnnnnnnnnnnnnnnnnnnnnnnnnnnnnnnnnnnnnnnnnnnnnnnnnnnnnnnnnnnnnnnnnnnnnnnnnnnnnnnnnnnnnnnnnnnnnnnnnnnnnnnnnnnnnnnnnnnnnnnnnnnnnnnnnnnnnnnnnnnnnnnnnnnnnnnnnnnnnnnnnnnnnnnnnnnnnnnnnnnnnnnnnnnnnnnnnnnnnnnnnnnnnnnnnnnnnnnnnnnnnnnnnnnnnnnnnnnnnnnnnnnnnnnnnnnnnnnnnnnnnnnnnnnnnnnnnnnnnnnnnnnnnnnnnnnnnnnnnnnnnnnnnnnnnnnnnnnnnnnnnnnnnnnnnnnnnnnnnnnnnnnnnnnnnnnnnnnnnnnnnnnnnnnnnnnnnnnnnnnnnnnnnnnnnnnnnnnnnnnnnnnnnnnnnnnnnnnnnnnnnnnnnnnnnnnnnnnnnnnnnnnnnnnnnnnnnnnnnnnnnnnnnnnnnnnnnnnnnnnnnnnnnnnnnnnnnnnnnnnnnnnnnnnnnnnnnnnnnnnnnnnnnnnnnnnnnnnnnnnnnnnnnnnnnnnnnnnnnnnnnnnnnnnnnnnnnnnnnnnnnnnnnnnnnnnnnnnnnnnnnnnnnnnnnnnnnnnnnnnnnnnnnnnnnnnnnnnnnnnnnnnnnnnnnnnnnnnnnnnnnnnnnnnnnnnnnnnnnnnnnnnnnnnnnnnnnnnnnnnnnnnnnnnnnnnnnnnnnnnnnnnnnnnnnnnnnnnnnnnnnnnnnnnnnnnnnnnnnnnnnnnnnnnnnnnnnnnnnnnnnnnnnnnnnnnnnnnnnnnnnnnnnnnnnnnnnnnnnnnnnnnnnnnnnnnnnnnnnnnnnnnnnnnnnnnnnnnnnnnnnnnnnnnnnnnnnnnnnnnnnnnnnnnnnnnnnnnnnnnnnnnnnnnnnnnnnnnnnnnnnnnnnnnnnnnnnnnnnnnnnnnnnnnnnnnnnnnnnnnnnnnnnnnnnnnnnnnnnnnnnnnnnnnnnnnnnnnnnnnnnnnnnnnnnnnnnnnnnnnnnnnnnnnnnnnnnnnnnnnnnnnnnnnnnnnnnnnnnnnnnnnnnnnnnnnnnnnnnnnnnnnnnnnnnnnnnnnnnnnnnnnnnnnnnnnnnnnnnnnnnnnnnnnnnnnnnnnnnnnnnnnnnnnnnnnnnnnnnnnnnnnnnnnnnnnnnnnnnnnnnnnnnnnnnnnnnnnnnnnnnnnnnnnnnnnnnnnnnnnnnnnnnnnnnnnnnnnnnnnnnnnnnnnnnnnnnnnnnnnnnnnnnnnnnnnnnnnnnnnnnnnnnnnnnnnnnnnnnnnnnnnnnnnnnnnnnnnnnnnnnnnnnnnnnnnnnnnnnnnnnnnnnnnnnnnnnnnnnnnnnnnnnnnnnnnnnnnnnnnnnnnnnnnnnnnnnnnnnnnnnnnnnnnnnnnnnnnnnnnnnnnnnnnnnnnnnnnnnnnnnnnnnnnnnnnnnnnnnnnnnnnnnnnnnnnnnnnnnnnnnnnnnnnnnnnnnnnnnnnnnnnnnnnnnnnnnnnnnnnnnnnnnnnnnnnnnnnnnnnnnnnnnnnnnnnnnnnnnnnnnnnnnnnnnnnnnnnnnnnnnnnnnnnnnnnnnnnnnnnnnnnnnnnnnnnnnnnnnnnnnnnnnnnnnnnnnnnnnnnnnnnnnnnnnnnnnnnnnnnnnnnnnnnnnnnnnnnnnnnnnnnnnnnnnnnnnnnnnnnnnnnnnnnnnnnnnnnnnnnnnnnnnnnnnnnnnnnnnnnnnnnnnnnnnnnnnnnnnnnnnnnnnnnnnnnnnnnnnnnnnnnnnnnnnnnnnnnnnnnnnnnnnnnnnnnnnnnnnnnnnnnnnnnnnnnnnnnnnnnnnnnnnnnnnnnnnnnnnnnnnnnnnnnnnnnnnnnnnnnnnnnnnnnnnnnnnnnnnnnnnnnnnnnnnnnnnnnnnnnnnnnnnnnnnnnnnnnnnnnnnnnnnnnnnnnnnnnnnnnnnnnnnnnnnnnnnnnnnnnnnnnnnnnnnnnnnnnnnnnnnnnnnnnnnnnnnnnnnnnnnnnnnnnnnnnnnnnnnnnnnnnnnnnnnnnnnnnnnnnnnnnnnnnnnnnnnnnnnnnnnnnnnnnnnnnnnnnnnnnnnnnnnnnnnnnnnnnnnnnnnnnnnnnnnnnnnnnnnnnnnnnnnnnnnnnnnnnnnnnnnnnnnnnnnnnnnnnnnnnnnnnnnnnnnnnnnnnnnnnnnnnnnnnnnnnnnnnnnnnnnnnnnnnnnnnnnnnnnnnnnnnnnnnnnnnnnnnnnnnnnnnnnnnnnnnnnnnnnnnnnnnnnnnnnnnnnnnnnnnnnnnnnnnnnnnnnnnnnnnnnnnnnnnnnnnnnnnnnnnnnnnnnnnnnnnnnnnnnnnnnnnnnnnnnnnnnnnnnnnnnnnnnnnnnnnnnnnnnnnnnnnnnnnnnnnnnnnnnnnnnnnnnnnnnnnnnnnnnnnnnnnnnnnnnnnnnnnnnnnnnnnnnnnnnnnnnnnnnnnnnnnnnnnnnnnnnnnnnnnnnnnnnnnnnnnnnnnnnnnnnnnnnnnnnnnnnnnnnnnnnnnnnnnnnnnnnnnnnnnnnnnnnnnnnnnnnnnnnnnnnnnnnnnnnnnnnnnnnnnnnnnnnnnnnnnnnnnnnnnnnnnnnnnnnnnnnnnnnnnnnnnnnnnnnnnnnnnnnnnnnnnnnnnnnnnnnnnnnnnnnnnnnnnnnnnnnnnnnnnnnnnnnnnnnnnnnnnnnnnnnnnnnnnnnnnnnnnnnnnnnnnnnnnnnnnnnnnnnnnnnnnnnnnnnnnnnnnnnnnnnnnnnnnnnnnnnnnnnnnnnnnnnnnnnnnnnnnnnnnnnnnnnnnnnnnnnnnnnnnnnnnnnnnnnnnnnnnnnnnnnnnnnnnnnnnnnnnnnnnnnnnnnnnnnnnnnnnnnnnnnnnnnnnnnnnnnnnnnnnnnnnnnnnnnnnnnnnnnnnnnnnnnnnnnnnnnnnnnnnnnnnnnnnnnnnnnnnnnnnnnnnnnnnnnnnnnnnnnnnnnnnnnnnnnnnnnnnnnnnnnnnnnnnnnnnnnnnnnnnnnnnnnnnnnnnnnnnnnnnnnnnnnnnnnnnnnnnnnnnnnnnnnnnnnnnnnnnnnnnnnnnnnnnnnnnnnnnnnnnnnnnnnnnnnnnnnnnnnnnnnnnnnnnnnnnnnnnnnnnnnnnnnnnnnnnnnnnnnnnnnnnnnnnnnnnnnnnnnnnnnnnnnnnnnnnnnnnnnnnnnnnnnnnnnnnnnnnnnnnnnnnnnnnnnnnnnnnnnnnnnnnnnnnnnnnnnnnnnnnnnnnnnnnnnnnnnnnnnnnnnnnnnnnnnnnnnnnnnnnnnnnnnnnnnnnnnnnnnnnnnnnnnnnnnnnnnnnnnnnnnnnnnnnnnnnnnnnnnnnnnnnnnnnnnnnnnnnnnnnnnnnnnnnnnnnnnnnnnnnnnnnnnnnnnnnnnnnnnnnnnnnnnnnnnnnnnnnnnnnnnnnnnnnnnnnnnnnnnnnnnnnnnnnnnnnnnnnnnnnnnnnnnnnnnnnnnnnnnnnnnnnnnnnnnnnnnnnnnnnnnnnnnnnnnnnnnnnnnnnnnnnnnnnnnnnnnnnnnnnnnnnnnnnnnnnnnnnnnnnnnnnnnnnnnnnnnnnnnnnnnnnnnnnnnnnnnnnnnnnnnnnnnnnnnnnnnnnnnnnnnnnnnnnnnnnnnnnnnnnnnnnnnnnnnnnnnnnnnnnnnnnnnnnnnnnnnnnnnnnnnnnnnnnnnnnnnnnnnnnnnnnnnnnnnnnnnnnnnnnnnnnnnnnnnnnnnnnnnnnnnnnnnnnnnnnnnnnnnnnnnnnnnnnnnnnnnnnnnnnnnnnnnnnnnnnnnnnnnnnnnnnnnnnnnnnnnnnnnnnnnnnnnnnnnnnnnnnnnnnnnnnnnnnnnnnnnnnnnnnnnnnnnnnnnnnnnnnnnnnnnnnnnnnnnnnnnnnnnnnnnnnnnnnnnnnnnnnnnnnnnnnnnnnnnnnnnnnnnnnnnnnnnnnnnnnnnnnnnnnnnnnnnnnnnnnnnnnnnnnnnnnnnnnnnnnnnnnnnnnnnnnnnnnnnnnnnnnnnnnnnnnnnnnnnnnnnnnnnnnnnnnnnnnnnnnnnnnnnnnnnnnnnnnnnnnnnnnnnnnnnnnnnnnnnnnnnnnnnnnnnnnnnnnnnnnnnnnnnnnnnnnnnnnnnnnnnnnnnnnnnnnnnnnnnnnnnnnnnnnnnnnnnnnnnnnnnnnnnnnnnnnnnnnnnnnnnnnnnnnnnnnnnnnnnnnnnnnnnnnnnnnnnnnnnnnnnnnnnnnnnnnnnnnnnnnnnnnnnnnnnnnnnnnnnnnnnnnnnnnnnnnnnnnnnnnnnnnnnnnnnnnnnnnnnnnnnnnnnnnnnnnnnnnnnnnnnnnnnnnnnnnnnnnnnnnnnnnnnnnnnnnnnnnnnnnnnnnnnnnnnnnnnnnnnnnnnnnnnnnnnnnnnnnnnnnnnnnnnnnnnnnnnnnnnnnnnnnnnnnnnnnnnnnnnnnnnnnnnnnnnnnnnnnnnnnnnnnnnnnnnnnnnnnnnnnnnnnnnnnnnnnnnnnnnnnnnnnnnnnnnnnnnnnnnnnnnnnnnnnnnnnnnnnnnnnnnnnnnnnnnnnnnnnnnnnnnnnnnnnnnnnnnnnnnnnnnnnnnnnnnnnnnnnnnnnnnnnnnnnnnnnnnnnnnnnnnnnnnnnnnnnnnnnnnnnnnnnnnnnnnnnnnnnnnnnnnnnnnnnnnnnnnnnnnnnnnnnnnnnnnnnnnnnnnnnnnnnnnnnnnnnnnnnnnnnnnnnnnnnnnnnnnnnnnnnnnnnnnnnnnnnnnnnnnnnnnnnnnnnnnnnnnnnnnnnnnnnnnnnnnnnnnnnnnnnnnnnnnnnnnnnnnnnnnnnnnnnnnnnnnnnnnnnnnnnnnnnnnnnnnnnnnnnnnnnnnnnnnnnnnnnnnnnnnnnnnnnnnnnnnnnnnnnnnnnnnnnnnnnnnnnnnnnnnnnnnnnnnnnnnnnnnnnnnnnnnnnnnnnnnnnnnnnnnnnnnnnnnnnnnnnnnnnnnnnnnnnnnnnnnnnnnnnnnnnnnnnnnnnnnnnnnnnnnnnnnnnnnnnnnnnnnnnnnnnnnnnnnnnnnnnnnnnnnnnnnnnnnnnnnnnnnnnnnnnnnnnnnnnnnnnnnnnnnnnnnnnnnnnnnnnnnnnnnnnnnnnnnnnnnnnnnnnnnnnnnnnnnnnnnnnnnnnnnnnnnnnnnnnnnnnnnnnnnnnnnnnnnnnnnnnnnnnnnnnnnnnnnnnnnnnnnnnnnnnnnnnnnnnnnnnnnnnnnnnnnnnnnnnnnnnnnnnnnnnnnnnnnnnnnnnnnnnnnnnnnnnnnnnnnnnnnnnnnnnnnnnnnnnnnnnnnnnnnnnnnnnnnnnnnnnnnnnnnnnnnnnnnnnnnnnnnnnnnnnnnnnnnnnnnnnnnnnnnnnnnnnnnnnnnnnnnnnnnnnnnnnnnnnnnnnnnnnnnnnnnnnnnnnnnnnnnnnnnnnnnnnnnnnnnnnnnnnnnnnnnnnnnnnnnnnnnnnnnnnnnnnnnnnnnnnnnnnnnnnnnnnnnnnnnnnnnnnnnnnnnnnnnnnnnnnnnnnnnnnnnnnnnnnnnnnnnnnnnnnnnnnnnnnnnnnnnnnnnnnnnnnnnnnnnnnnnnnnnnnnnnnnnnnnnnnnnnnnnnnnnnnnnnnnnnnnnnnnnnnnnnnnnnnnnnnnnnnnnnnnnnnnnnnnnnnnnnnnnnnnnnnnnnnnnnnnnnnnnnnnnnnnnnnnnnnnnnnnnnnnnnnnnnnnnnnnnnnnnnnnnnnnnnnnnnnnnnnnnnnnnnnnnnnnnnnnnnnnnnnnnnnnnnnnnnnnnnnnnnnnnnnnnnnnnnnnnnnnnnnnnnnnnnnnnnnnnnnnnnnnnnnnnnnnnnnnnnnnnnnnnnnnnnnnnnnnnnnnnnnnnnnnnnnnnnnnnnnnnnnnnnnnnnnnnnnnnnnnnnnnnnnnnnnnnnnnnnnnnnnnnnnnnnnnnnnnnnnnnnnnnnnnnnnnnnnnnnnnnnnnnnnnnnnnnnnnnnnnnnnnnnnnnnnnnnnnnnnnnnnnnnnnnnnnnnnnnnnnnnnnnnnnnnnnnnnnnnnnnnnnnnnnnnnnnnnnnnnnnnnnnnnnnnnnnnnnnnnnnnnnnnnnnnnnnnnnnnnnnnnnnnnnnnnnnnnnnnnnnnnnnnnnnnnnnnnnnnnnnnnnnnnnnnnnnnnnnnnnnnnnnnnnnnnnnnnnnnnnnnnnnnnnnnnnnnnnnnnnnnnnnnnnnnnnnnnnnnnnnnnnnnnnnnnnnnnnnnnnnnnnnnnnnnnnnnnnnnnnnnnnnnnnnnnnnnnnnnnnnnnnnnnnnnnnnnnnnnnnnnnnnnnnnnnnnnnnnnnnnnnnnnnnnnnnnnnnnnnnnnnnnnnnnnnnnnnnnnnnnnnnnnnnnnnnnnnnnnnnnnnnnnnnnnnnnnnnnnnnnnnnnnnnnnnnnnnnnnnnnnnnnnnnnnnnnnnnnnnnnnnnnnnnnnnnnnnnnnnnnnnnnnnnnnnnnnnnnnnnnnnnnnnnnnnnnnnnnnnnnnnnnnnnnnnnnnnnnnnnnnnnnnnnnnnnnnnnnnnnnnnnnnnnnnnnnnnnnnnnnnnnnnnnnnnnnnnnnnnnnnnnnnnnnnnnnnnnnnnnnnnnnnnnnnnnnnnnnnnnnnnnnnnnnnnnnnnnnnnnnnnnnnnnnnnnnnnnnnnnnnnnnnnnnnnnnnnnnnnnnnnnnnnnnnnnnnnnnnnnnnnnnnnnnnnnnnnnnnnnnnnnnnnnnnnnnnnnnnnnnnnnnnnnnnnnnnnnnnnnnnnnnnnnnnnnnnnnnnnnnnnnnnnnnnnnnnnnnnnnnnnnnnnnnnnnnnnnnnnnnnnnnnnnnnnnnnnnnnnnnnnnnnnnnnnnnnnnnnnnnnnnnnnnnnnnnnnnnnnnnnnnnnnnnnnnnnnnnnnnnnnnnnnnnnnnnnnnnnnnnnnnnnnnnnnnnnnnnnnnnnnnnnnnnnnnnnnnnnnnnnnnnnnnnnnnnnnnnnnnnnnnnnnnnnnnnnnnnnnnnnnnnnnnnnnnnnnnnnnnnnnnnnnnnnnnnnnnnnnnnnnnnnnnnnnnnnnnnnnnnnnnnnnnnnnnnnnnnnnnnnnnnnnnnnnnnnnnnnnnnnnnnnnnnnnnnnnnnnnnnnnnnnnnnnnnnnnnnnnnnnnnnnnnnnnnnnnnnnnnnnnnnnnnnnnnnnnnnnnnnnnnnnnnnnnnnnnnnnnnnnnnnnnnnnnnnnnnnnnnnnnnnnnnnnnnnnnnnnnnnnnnnnnnnnnnnnnnnnnnnnnnnnnnnnnnnnnnnnnnnnnnnnnnnnnnnnnnnnnnnnnnnnnnnnnnnnnnnnnnnnnnnnnnnnnnnnnnnnnnnnnnnnnnnnnnnnnnnnnnnnnnnnnnnnnnnnnnnnnnnnnnnnnnnnnnnnnnnnnnnnnnnnnnnnnnnnnnnnnnnnnnnnnnnnnnnnnnnnnnnnnnnnnnnnnnnnnnnnnnnnnnnnnnnnnnnnnnnnnnnnnnnnnnnnnnnnnnnnnnnnnnnnnnnnnnnnnnnnnnnnnnnnnnnnnnnnnnnnnnnnnnnnnnnnnnnnnnnnnnnnnnnnnnnnnnnnnnnnnnnnnnnnnnnnnnnnnnnnnnnnnnnnnnnnnnnnnnnnnnnnnnnnnnnnnnnnnnnnnnnnnnnnnnnnnnnnnnnnnnnnnnnnnnnnnnnnnnnnnnnnnnnnnnnnnnnnnnnnnnnnnnnnnnnnnnnnnnnnnnnnnnnnnnnnnnnnnnnnnnnnnnnnnnnnnnnnnnnnnnnnnnnnnnnnnnnnnnnnnnnnnnnnnnnnnnnnnnnnnnnnnnnnnnnnnnnnnnnnnnnnnnnnnnnnnnnnnnnnnnnnnnnnnnnnnnnnnnnnnnnnnnnnnnnnnnnnnnnnnnnnnnnnnnnnnnnnnnnnnnnnnnnnnnnnnnnnnnnnnnnnnnnnnnnnnnnnnnnnnnnnnnnnnnnnnnnnnnnnnnnnnnnnnnnnnnnnnnnnnnnnnnnnnnnnnnnnnnnnnnnnnnnnnnnnnnnnnnnnnnnnnnnnnnnnnnnnnnnnnnnnnnnnnnnnnnnnnnnnnnnnnnnnnnnnnnnnnnnnnnnnnnnnnnnnnnnnnnnnnnnnnnnnnnnnnnnnnnnnnnnnnnnnnnnnnnnnnnnnnnnnnnnnnnnnnnnnnnnnnnnnnnnnnnnnnnnnnnnnnnnnnnnnnnnnnnnnnnnnnnnnnnnnnnnnnnnnnnnnnnnnnnnnnnnnnnnnnnnnnnnnnnnnnnnnnnnnnnnnnnnnnnnnnnnnnnnnnnnnnnnnnnnnnnnnnnnnnnnnnnnnnnnnnnnnnnnnnnnnnnnnnnnnnnnnnnnnnnnnnnnnnnnnnnnnnnnnnnnnnnnnnnnnnnnnnnnnnnnnnnnnnnnnnnnnnnnnnnnnnnnnnnnnnnnnnnnnnnnnnnnnnnnnnnnnnnnnnnnnnnnnnnnnnnnnnnnnnnnnnnnnnnnnnnnnnnnnnnnnnnnnnnnnnnnnnnnnnnnnnnnnnnnnnnnnnnnnnnnnnnnnnnnnnnnnnnnnnnnnnnnnnnnnnnnnnnnnnnnnnnnnnnnnnnnnnnnnnnnnnnnnnnnnnnnnnnnnnnnnnnnnnnnnnnnnnnnnnnnnnnnnnnnnnnnnnnnnnnnnnnnnnnnnnnnnnnnnnnnnnnnnnnnnnnnnnnnnnnnnnnnnnnnnnnnnnnnnnnnnnnnnnnnnnnnnnnnnnnnnnnnnnnnnnnnnnnnnnnnnnnnnnnnnnnnnnnnnnnnnnnnnnnnnnnnnnnnnnnnnnnnnnnnnnnnnnnnnnnnnnnnnnnnnnnnnnnnnnnnnnnnnnnnnnnnnnnnnnnnnnnnnnnnnnnnnnnnnnnnnnnnnnnnnnnnnnnnnnnnnnnnnnnnnnnnnnnnnnnnnnnnnnnnnnnnnnnnnnnnnnnnnnnnnnnnnnnnnnnnnnnnnnnnnnnnnnnnnnnnnnnnnnnnnnnnnnnnnnnnnnnnnnnnnnnnnnnnnnnnnnnnnnnnnnnnnnnnnnnnnnnnnnnnnnnnnnnnnnnnnnnnnnnnnnnnnnnnnnnnnnnnnnnnnnnnnnnnnnnnnnnnnnnnnnnnnnnnnnnnnnnnnnnnnnnnnnnnnnnnnnnnnnnnnnnnnnnnnnnnnnnnnnnnnnnnnnnnnnnnnnnnnnnnnnnnnnnnnnnnnnnnnnnnnnnnnnnnnnnnnnnnnnnnnnnnnnnnnnnnnnnnnnnnnnnnnnnnnnnnnnnnnnnnnnnnnnnnnnnnnnnnnnnnnnnnnnnnnnnnnnnnnnnnnnnnnnnnnnnnnnnnnnnnnnnnnnnnnnnnnnnnnnnnnnnnnnnnnnnnnnnnnnnnnnnnnnnnnnnnnnnnnnnnnnnnnnnnnnnnnnnnnnnnnnnnnnnnnnnnnnnnnnnnnnnnnnnnnnnnnnnnnnnnnnnnnnnnnnnnnnnnnnnnnnnnnnnnnnnnnnnnnnnnnnnnnnnnnnnnnnnnnnnnnnnnnnnnnnnnnnnnnnnnnnnnnnnnnnnnnnnnnnnnnnnnnnnnnnnnnnnnnnnnnnnnnnnnnnnnnnnnnnnnnnnnnnnnnnnnnnnnnnnnnnnnnnnnnnnnnnnnnnnnnnnnnnnnnnnnnnnnnnnnnnnnnnnnnnnnnnnnnnnnnnnnnnnnnnnnnnnnnnnnnnnnnnnnnnnnnnnnnnnnnnnnnnnnnnnnnnnnnnnnnnnnnnnnnnnnnnnnnnnnnnnnnnnnnnnnnnnnnnnnnnnnnnnnnnnnnnnnnnnnnnnnnnnnnnnnnnnnnnnnnnnnnnnnnnnnnnnnnnnnnnnnnnnnnnnnnnnnnnnnnnnnnnnnnnnnnnnnnnnnnnnnnnnnnnnnnnnnnnnnnnnnnnnnnnnnnnnnnnnnnnnnnnnnnnnnnnnnnnnnnnnnnnnnnnnnnnnnnnnnnnnnnnnnnnnnnnnnnnnnnnnnnnnnnnnnnnnnnnnnnnnnnnnnnnnnnnnnnnnnnnnnnnnnnnnnnnnnnnnnnnnnnnnnnnnnnnnnnnnnnnnnnnnnnnnnnnnnnnnnnnnnnnnnnnnnnnnnnnnnnnnnnnnnnnnnnnnnnnnnnnnnnnnnnnnnnnnnnnnnnnnnnnnnnnnnnnnnnnnnnnnnnnnnnnnnnnnnnnnnnnnnnnnnnnnnnnnnnnnnnnnnnnnnnnnnnnnnnnnnnnnnnnnnnnnnnnnnnnnnnnnnnnnnnnnnnnnnnnnnnnnnnnnnnnnnnnnnnnnnnnnnnnnnnnnnnnnnnnnnnnnnnnnnnnnnnnnnnnnnnnnnnnnnnnnnnnnnnnnnnnnnnnnnnnnnnnnnnnnnnnnnnnnnnnnnnnnnnnnnnnnnnnnnnnnnnnnnnnnnnnnnnnnnnnnnnnnnnnnnnnnnnnnnnnnnnnnnnnnnnnnnnnnnnnnnnnnnnnnnnnnnnnnnnnnnnnnnnnnnnnnnnnnnnnnnnnnnnnnnnnnnnnnnnnnnnnnnnnnnnnnnnnnnnnnnnnnnnnnnnnnnnnnnnnnnnnnnnnnnnnnnnnnnnnnnnnnnnnnnnnnnnnnnnnnnnnnnnnnnnnnnnnnnntctttttgtctgacaaaaagacactgactccctgggacttagcatataatagatgtttgctggctggctggctggctggatgaatgaatgaatgaatggaaggcagttgattcagaaatgcctattactacctcaatttagttccacagacattttcctgagtccctaataataattatcagctgcaagctgacaatataggctaaatcagaggtgccttggccccaaagcctacatgatgggggattcaggggacctgagacagatgcccaaaggacaattaggtcacaaggattgaagggaatagaaggggctggagtgctcagaggagaggcattgtagtagacatctgttgctttttcagctccccacaatccagcccccatttcatttgggggatcatcccgagacagagactgctaattgtcccccaatacttattgtccccttctatagtaatagaattcctctaactgagtacataactgcccagaataatgaccacatttcccaggcatcgtgcacccaacatgctgtagattaagttctcagcagtgagatgttagcagaagtaatttttgcaatttctcggtcatgcacttcagaagaaatgtgcctcgcccctttccctctcccctggtaggaatgaagtcatggtgtgaagccagtttatatcaatcagatgaagctaaaaccctaaggatgtcagagtgacaaaagagaaggagcctgtgtcccaacacactgtggttgcctatcagccctggactagctctaactaggttttccatgaaagagaaattaacctccagtctatttcagtcactatttggggtgagtgctctcttgcagaaggaaagcctgtatactaattattagtgctgtatactaattattagtaaaggctgtatactaattattaccaagaagggctgtgttgctggtaacaaaactgaaaacatattttaaatgctatacataaatatgatgatctggaaaccctgtttatgccatgccatagcagtcgatcaactgattcctgcaataccttgcaaagtcagctcttgctctaaaggaaacagttggaaatttcagaatgcaggtgtttgctggatgcttcttgccactctcaacagagtcctacatgacccagaagaacgtggacagagctagcccgaggaaggcagatactgaagagaatacagcagtgctgaaagaagctccctttgcctatgggctataacctcagtttaaaaagttttcagacctaaaaaaaaaaactattgcttgttaaaaactccatatttgatagcttgattcttatatcttgaaagatttttaaagtagtgtaaatataactgatgttatgaaattctgtttcatgttctgtagagcagttatatatcataatgtaggcagaaatcagccatcatatcatatcatatcatatcatatcatatcatatcataatgtaggcagaaatccgccatcatataattgtgagcagaaatcagccatcatataattgtgagcagaaaaatacctaattggattctgtaaatgggtatattttgaattatgctgtacagtgcttgcccaaaaaaatactgtgcctgaaaatggcatcaatttattcataaaaaatatgatttaagtgattttctaacaacatttcaaaggcgcctttatggttctcaaagtgttgccatataataatattcctttagaataaaattatatttatttaaaaaaataaagagaaaaatctattgcttctgtaccacaaactgaggcagatatagaataattttctgaagaagcaggattagcaggagacaagactatggaccctagtctttctcaaacacttgattacgtttctcaacctgacaatgacagccgctcggccacaaagaccagatcaaggaagctgccttccagtccaagttgagtgttttcgctggtctcaggttgagagggaggtgaatagatataacatacaggctgataaataaaaggccaccatttttaggcttaaatactgctaatctaaaggaggttgagcatcactaaaccaaaaacccagaaatccaaaatgctctaaaatccaaaacttcttgagcacacatgatgctcattggagcatttcagattttggattttcagattagggatgttcagccaggataatgcaaatattccaaaatctgaaatatgaaacactctggccccgagcatttcagataagggatacccaacctgtacttgccccagaggataactagccacaaataggcagaaagccaattgagattttaaggggcatgtgttaccaaagaaccatgagtcgggctggtacaagtctgcatttttgactccttaaatcaaccgacccctacccaccaaacctgcacctgcaaaaagtgggctgcaaaagctatgcagcccaggcccagtgtggtggcatgtgcctgtagtccctgctgctctgaaggctgaagtgggaggatttcctgagccccaggcacacgagtccagcctgggcagcacagcaagaccttctctctaaaaaaaaatgtttaagctgtatagccctaagagggatacatcgtttgatgccctttagttgtgccatggaaggcagtggacaaagaggggaccaccaaggtccaaagatgtctatcccagggaatactcctggagagaggcgctgtcatccaaggactctgctccactccctgggaaccttcacaatttctgcccaccaggatttggtgggtgtgtttttccctcttctggatgaggtttcccaccatgtttatcttatttttactggctgttgcatattgggtgtaaggaggcaggcaatgtatgtaagggttccagggcaatacaccataaagaactgcatccagaagcctggtgtggtggctcacacctgtaaacccagcacttcgggaggccaagatgggaggattgcttgagcccgggagttcgagaccagcctgggcaacatagtgagaacttgtctaaaaaaacaaaaataaaacaaaaaccacatcagatctgatggtgcaggctgtccctccacaggtcccaggcttggagctggacataggcactggatgcaactttagggttgtctcccctggggaggggacacatggaaatttgactggccaatgggacaggctggggctgagattgctaattgcccccgatcacactcatctcctatgtttaaagaattcttgtttttttatctggagatacggaaatccagaaaaaaatactgtatttcctcacttcctagaagctatatttggccaagtaactgaccagcagcattgaagtagggagaggtgacacttttaaccagaggggcgagccttcctcttccgccttttccgtttccactggctaggcagtggaggtgatggtgaaacatctcacatcacaatacctagggatagagaagcaacaagatggggaaaaaaaaacctgggctcccaggctgcttacctgcaggcaggtgagggagaaagaaacttctatcttgcttaagccaatcttatttgaagtctctcttccagcagttcaacatatattccacaaatatattactcacactctacctcctctacgctcatgtgggtcttagaagaggggtgtatgctaggcctcagccaatcactgtatcagtttcctggccagagattgttcaggataagtgtgtaccccacttagatccaatgataaatactttatctgggaatctggagaaagaaactcactctattccccaagggaatgtggcgatgaagccaccatcttacatgaagccggatactggagccgcccagagaaggacaaagtgaggatgtgcagaagcaagttcccgagaacatcccgggagccttgacctcagtgaggactaaggctagtctcatcccttgacatctcaattaaggaagacaatacatttccttttttaaaaaccaatttgcattatatttccatcctttgctaccaaaagtgtccttagtgatacgctggtcaccgtgggagggttacagaggcaacatggaagggggatgtctgctttggtctcagaccacctgcaacttgtttgggggaaaaaatgggtttgttataaggatgcatgaggatttgaaccagaattgaaaagtcctcaggaataggcgagacaacttcagaaatagccattgctccctctcttcatggagcttcccagaccggtttcctcctgactgtgctctgccagctctttccaccaactggcgccctctcctgatgctgaatttctgctgctttgaaactgagttgccaccatgccagctcctcctagtggcacgtcttcacatatccttcatgcttcttcccttgcagctggctgtcttgctcctgccctgtttctcaacttccaatttaaaaaagagaaattggatagacatagatcatctttaatgccagaggaaaactcacaaatcctgaccagcctgattcagagcctgagtcaggtgtttgcttgctcttgtccaactgttacatgatctaaaatagggccacctgctggctgtctcctcctctagggctgcgggcatggcaggtaccaccactgatgtgtcttgtatgcctacacagaattattgtattaggcaatactcttctgacttcaagaggcagaaacccaactcaaattggcttaagcaccaaagggacttttcactgtttcttgtaagtcaacagtccagggtaaccgggcttggccagagcccctagcttaaatgatgtcatcagaactggcacctctctcttttagccaggctctccctacatagtgggtcttgggaactcctggattatgtttatgtcctcacagctctaagtccatggacaagagtttaaggaacaaggacagtgccaagttaactgtactagccattactgttttgttttgttttgttttgtttttgagactgaggctctctctgttgcccaggctggagtgcagtggcgcaatctcggctcactgcaacctctgcctcccaggttcaagtgattctcctgcctcagcctcctgagtagctgggattacaggcccccaccatcacgcctggctgatttttgtatttttagtagagacagggtttcaccatgttggccaggctggtctcaaactcttgacctcaaaagatctgcccacctcggcctcccaaactgctgggattacaggtgtgagcccggctgccattactgttattatggctcccaaaagttgcccacaaattccaggttcaagtcatagtaaactaaggtaggccactgcccagctcctaaccactcactgaggcctgcagcatgtgatgctctgactggccaggtctggatcaaatctagctctggagttaaaagagaaatgggaccactgaattttgtcaccagaagcagcaagaatagatgctgagcaggcaaaaacaacaaatgtcctctgcaatctgcagcattggttgttgaatgttacacatacccctcttgacataaacacagctgttaaaatattctttctcaagataaggcagttataccatataccaccaaaaccctactcactcccactgcaacagaagacagcgcagaactcaggttctcaaccagttgctgcattcaggttcagaacccctggaggatgtgctgtcctctccgaactgtggtaagtgaagctctgaggacatagatagcaggacccaacgggcctcttccatgtgcctccaccggggtgagtaaattccaatcagtccccaatgagtctggcttatttcactcaagattcaagtttcagaatgaaagcatctgactggcccagtttgcatcatgcacccacccactgaccaggggagtgcagagcacagtgcatctgttggaggcgggaacatggtttctgttactatgagcgagaagtaaggatgctgggctaacgtgggaaatcctcgctgagtggatttctctgcctcgataatgacatggacactgctgatgagctagctggtgggtgtggctgggtcaccaggctcatatgtggcagccaggcagctccagataggagggggtccccaatgtctgggagctgtggactcccaattcttgtcttgaggcccactggcacagtcctcactttggagaaattggggcactgtttatgccagttcaggcttaggccctggctcctccctggtctgatcatgaccttgcttgaggactatgtgtggacactgctgattgccgacctgtgtcaggatagtctgggttatgttgcaatagcgacctcacaaaaatagcagtggattaactaaacacaagtctatttcccacccttgctctatgcctatcacaggtttggcaagagggctctgttcatcgtggaggactcttggcatttgcttttacagtcatcacatcaatggaaaagaacttggggaacaatgtaccaactgtctttttttaaacttttatttcagaatcagagggtacatgtgcaggttgttacaaaagtatattttgaggctgaggtttggaggagaaatgaatccatcactcaagaggagcatagtacacaataggcagtttttaatcgactcttgacccccctccctccctctcttctcttgtattccccagtgtctgttgttcccatttttatgaccatgtgtacccaatgtttagctctcatttaacaagtgagaacatgcagtatatagttttctgttcctatgttaagtcacttaggataatggtttctagctgcatccatattgctgcaaaggacaggtcttccttctttttgtggctgtgtagtagtccatgatgtatatgcacaacattctttctatccaacccactattgatgggcacctgggttgattccatgtctttgctaccatgaatagcgcagtgatgaacatatgggtgcatgtgtctttttatgcaccaacttttaaagcttccactagaaagtgatacatctcacttctgctcccatttcattgatcaaagtaagttacacatccttaactaaccccaagggttgtaccatctgcctagaagaaagaaaaccaaatatagtggccaaatacccacttcactaatgacaaccactacccaatttctctctcctcttcttccaaaacagagcaccagttttgactgggatgacaattgtctagctaaatatatttacttttccttgtaacttccttgtatctggggttagttacacgtgaccttgttctaaccaatgagatgtaagagggaatcactaggtaggggtttcttggaaacctagatgtgatgccttgagacgcagcagccatactgtgaacttaaggacagaaaccacacactccagaaggtgaaggaggatgatgagggagcctgggatcttgatgaaacccttaagcatctgtgccaccctgggctgctgatctctggggtgctggctacataacaacaataaacccctatctgatccactgatggtcaggtgttctggtatttcatccaaacacgttccttactatttacctgctctgtatttgaggtttctcagtcttcggtctttcatgtacagatgatttatggtgcaatgggaagaactttgaatcattcgacactggattcaaatctggggttgaccgatttctagttgtgtgaccttgggcgagttgcctaacctcttccagctttagttttctcatctgtaaaattggaattgaaatcccgtggcattgacagccatttcttatgtcctcttccttcaaccagtctcccattataggactgaaaaggtcagatacacactttcttggtctccttgaaaccagcatggctgtgtgtgggtctggccagtgagcaacaaggtatggagggtcagtgtgctggaggctttctgataagatgagggatgtgagtgaggaaataaacactttccctatcagattcctttccttcttttcctgcctttgaacttggtgttagaagacaccaagccatctcgaaacttgaaggtggcagagcaggtgacacatccaaggaatctggatcttagatgatgatgttgagctgccaagtcaaatctgaggctacccaaccacaaatgtcttgctaagtaacaccatttctccccattccaaggaaggcctttttttttcacattctgacaccactgtcacttctcatatctgatttgatagtaaagaatggcttcatggtttggcagcaagttttgcttatacaaagaaagtggtgcaaaacagtggtgcatttcacaatcaatgacatcttagagctaatgaaatacgaaagcaaatcttcttatggtgtaagccctatttaggcttatttagtcagatttagtcagatttactgtaaattgtaaccaaaagatttcctaagtgataaaagtacctgccataggccaggcatggtggcttatgcctgtaatcccagcacttgggaggccgaggcaggcagatcacctgaggtcaggagttcaagatcagcctggccaacatggtaaaaccacatctctactaaaaatacaaaaattagccaggcatggtggtgggcacctgtaatcgcagctactcaggaggctgaggcaagaaaatctcttgaacctgggaggcagaggttgcagtgagctgagatcgtgccattgcactccagcccgggcaacaagagcgaaactccatctaacaacaacaacaacaacaaaaaaaacctgccatagatggtggttgtaaagaataaataattttttaaaaagaatgaatgaataaaacaatgtaagtaaagtatttggtgtagattatttatttggtcagcatttcaaaatccttatataaattattttgttctactatgtccaaatgtaaacacacatgtgtgtgtgcaaacccaagaaaggtgtatgtccctaaaataaggccaggtacaaatttgggccacagacggcccaaagcaggtgggcaatcttgtatcattgaagacttgtgattgcaaatggcagatacctactcaagctggcattaagtacacatcggaatttgtgggctcacctaagtgaaaaaccaggtggtgttctagcttcatgccttgtctcattcacccatcaccagcatccagtatctctctccctctctttctctgggtacgacctattcagctgaccctgtcctcagaccagcttttttctcatcatttgagattctctcattaaattcaagaccctcgggaagaacccttgcctctgtccagcattgtcagaaaaatcagccttgcagctcattggctctgtgtttccctgaaccaatctctgcagccaggaggagggacctgtggaggaatcaagcccagctggaagaagaagagggtggagtcaaccacacccaagaggagggaagggctttcccagagggcacttttgactggggcaccactgcaacaaaagaaggataaagtatgctgtgtgaaaacctcagatgtcccccacaagccttctctctttcccctaaacccactaccccttagcactttattcctcccacagcagcagaggctggtccagagaagaccaaggccagccagtaaggaaaagtgacaagatcatccaccttcagccacaactttgaggcacgtggagaggggacaaggggtgtggccctgccagctcacagctctagtctcaccaaaggaatcaaaagagagtgacagtgttttgctcagcttttgctgcttacagagtctctatggcatcatccagaagcatttatttttcccttccatgtctgtgggttggctggggtctgctggctcaggctgaactccttgatctcaggctccaggtggggtttggacctgcaccacagagcactcattggcctggagccagctctccctgggccatgctcatctcaccgccttggctaaagcacaggagagcaaggccagccgcacggtgcagttccagcctctgccgcatcatctctgccaactttccagtggcccaagcaggtcatgtggccatgctcaaagtcaaatcatggggaagcatgtgtcccactgatatggtttggaagttttttcccctccaaatctcatgttgaaatgtggcttccaatgttgcaggtggggcctggtgggaggtatttggatcatgggagcagatccctcatgaatggcttggtgcctccttttagtaatgagtgagttattgctctgagttcaggcaagatctggtagtttaaaaaagtgggcatccctttttcttgttccctttcttgccacttgacacacttgctccccttccaccttctgccatgagtagaagcttcctgaggcctcaccagaagcagatgctggcaccatgcttcctttacagcctgcagaactgtaagccaattaaacctcttttctttataaattacccagtctcaggaattcctttataagcaatataaacagtctaatgcacccaccatgttgcaaggctgtgggagtacaataccggtacagggaagagagaacttgagaccaatcatttaattgaccacagaaggtaaccaaagaacagccttcccacaggctcagcacttttaactgatttttttatggaagtgaaacctcagccttgagcactaaagcccagtaaaatggtctcgttcaagatcttgggatctatttgagggaacaaaggaggacatgtgagagccccgagctccctatggaggccacacttggaaggagcaggtattcagcagagatcattcccttctagccactgtccccgcagtcccaagacagtcatcagaaaggccacctaggtaataatcaaatctgcaaacttgagttaagtctccccatctcccatggtgagggccagccacagacagcctctgcccttggagagggtgccatggtcagcctcctctctcctctctcactgcccgtagcagacttctgaggtaagagcatgagcagaggaaaggaaggggatttggaaagttctgtcttgatggtctcgtaagatgccttacctctccagatctggaagaggtttcatgctcaaatgggccctttgaaaggaaccctcgatccttcacccctgacacccactccagaaccagagtgcccttgacctgagcaaatgaatcagaagccacttgctccctcctctacccctagaaagttcacctcctacttccttccactgtgctacatatgccctctgggtagggcctgtggtcaggactgagatgatcacacaccggctctttcattcacatggccaatgtctggttgtgggaaatatgtacacattccacatcctgacaagtccccaggcacatgtcagtgacaattccccatcacactctgagccacactcgcactaccagtggcgtgtcatgtgcccaagatccacaaacctttggctggcatctgagggagcccggctgcttcccaacacagcagctgcctactctcttcatcagaaccaagaagccacaattgcctgtgcacctccaccagcagtccgtctgcctcccaaactccaggggacagaaagcaagctctcagagcagagttgaatcccccactctctgggctggagggcaggctgtcctctgctccacctgccccctctctacctcagcacagccccctccccgagcacacccccctccccagccctggccagccgtaggaggtgggagtccacatcacagccccagccctcaagaaaggaatctggcaaatcccctccctccctcactctctcagcccttcctctcactgggggacagttgtccagcaggttctcagccacctttggaaatctgcgtcttagtctgtcaccactctttggagtttgatagctaatttcttcatgtcttaaccgacacatcaatttagcatattaatacatcaaaaaacaaagtctttctgccctcttatggctcattggatgcatgcctggtgactgagcacattgctgttcctgaaaaaaaaaatgtgggtcagttgttagcacagaagctggaggaggggcaggagtgagccatggaggctgagcagtaaattaattgttgtttgccacaaatggcccttgctgaaaagatcccatccctaaggggggtcaaaaaactttaggacagctgagtgcccagaggtgacgattgaggaaggacaagccttgcctcagttcctgacttctgctccatgctgaggggcagccttggtggtcaagagactgaagctggaacagctgatgccaacgccggctcagctccttgctaacacagtggccttggcgggctcactcccctctgccgccctctctctccacccctccaggggcaggggctgcatgcagcaggatgcaggggctgccaggacaacataggtccccacctcagcacctgtgctggctccatcctctctggctcctccacgtggggctttccatggccccagacttagctccttctgctcaacaactcctgccagaaaggaggtgtctcttccccagtacatcccataaaattccagtgttgatcctgattagcctctcacgggggcagggggtggcgtcacagggacatccctgaacctatcactgcagccagaaatgaactaggctgagcagccaggcctgggtcatggacaaagcgctagaataggggtgagtaggggagtgccaggtactgtgtggacagggaaggggaaggaagttgttccctccagagggaaggcagagttctggtgctggttgagaggaggcaggggagcaggcctgccaggcaggggagcagcagggcaggaagcagaaaccacgcccaggggcaggagggagccacaggcccaagcccaccctgccagtcggagtgactgtctgcaggaggagacacaatttggagccagcatgtttcagtgggggacgagaagttctgatccaacaaggaaagatactccctccaagctcctcaaaagaaggggctggaggaaattaagtctgaggccgccatagcagaaccaaagagcagacaggatgctggcaggggaaccctccccctcctcacaaagaaggacctgggctgacctggtgcaatttgcatgaattgagaaacacagtcttccacatgcttctcagcgtggcctttatcctgctatggcctctgtgttcctcagtgatgagagatgacacttccttagacagggatgattcttaaggttaattgaaagtggcctttctcgtaatcatctgctgcaatgaattattaatcacctgcaggcatttgcaggtctttaaactcttggacttcctgcagccctccttggaagtgcttttgccatggaaatacaacttccgcttggccatgaaagacagaacccatgtctgctgctgtttccaggcttcccagctccacagacacggggaagaacaaggtctgaaaacaggaagcagagccagagctgctgccagaccctggatgcctttctgttctggggagctggctccaggccagccaggtctcagagcccccgggcagtggatggaggggaggctgcccaaagtgcctgtggctctttgcctgattcacggtcagcgccacaggagagggtctcctgggtccttgccctacagctgctcactggtgaagaaggaacgagggagccaggtgccaggcctagatccaccacttagtgggtgggccaggaaacctctttgattcagtttcctcatctgaggaggaggtcatgaccctgcagggcagacatgaggcagggctccatgggatcgtgtacatcaggcctgcatctcaatgctcagaacatcaggagcagcaagaaggatgagctccctcctgccacctgcttttatcttcccgtggaggaagattgactcaaaactcagtgggctggctggcagtgtaaggattttgcagatagagctgacaacgtgattttgcagaccccagaagctggtctgcaggaccagggcagggagctcctgttgggccctaaattgtgagcccaggatgtgtatgatgcatggacaatgtgggcagaagctggggcagctcatcccaatggcaagagcccttcatctgccattcagcacagcctcagccctggaggtggatagtggcgatgccaagctgaataagacacggccccctgccttcatggaggccctcggctgccaggaagagtgaggcagcagtctcaggcacagagtcccatattcggcatggtagctgcaaggaccatgaggacgaggggatgatgaagggtttcacagaaggcaagatgctgggggttcatcttgaaacatgagcagtggagaaggagggtgggaggggcattgagtatttcagacagggagagagcagcatggtgggagagcccagtgcatacgcagagccgtggaagtagctgcatcagtctgggcacaagcactgcagagagatgggtggtgggggggatgagaatgggaggggagcctggaagacaacagctgggaaggggagtgggtgcagcatggaatctgaagagctgagaggaggcccatgcagagctccagatgagaggtgatggagggctgggcaaggttttttgccatgatagagatggacagaggaggaacagctgtcaggacttggtgacacagagaaagatggggactttggaaaagcacagcatgggggtcgagagatggcagctctgggcctggcactcaggaagtgccagaagggattcccttttcaaaaaacatcccactacccaactccacccccagaacagcctgagtacagctcgggcgcaatcatggaggcagctggtgtggatgccatgccccactggggtggtcaggtgggggtgcatggcagctgggggaaggggtcaagatagctgacgggttccatgtaggggtcccctgagccttgctagctgcctgagtccagtgttgaggcacactgaactctagacagaggaaggggaaatgtaagccacccctcccagggtactgcatggacaacatggtccacacaatggtcctagagatatcaagtcctcatccccaaccccgtgactacatagcaaaaggggctttgcaggtgtgattaagttaatgatcttgagatgggggtggtggttatcctggattatctgatgagcctcttatagagaaacgccacactctgagatgaattcagaagtcctttattagccggcaaccgagagatggctagtgctcaaaattctctcggccctgaagaaagggctagattttcttttatactttggtttagaaaggggaggaggagcctagctgaagcactcttacagaagcaaaacaggcaaaaagttaaaagacaaatggttacaggaaaacaaacagttccaggtgcaggggttttaaatccatcacaaggcgatagatgcgggggctttgggtaccatcaaccggacacaaatgtgggggcttagggtactatcaactgggcaaattcctgggaactgcggatatagcttgccacagtatcttatccattaattgcattctttgatgtgctgggagtcagcttgcacaagttaagtccttgaggaaggggggtgggtaaggggctgcaagtgaaggagccaaaatggagtgtgtctggctctctcagctaagggacagtcaattcaggttaaaacaaggtagggtatcacacttacaagagggaggcagaaagagttgatgtgaaatgacctggagtgggagaggttagaaaaggctgtgctgccggctttgaagacaaaggaaagggccactagctagcagcctctaggagctggaaacgctgggaaacagctcccttgcctccagaaggcacaggccctgccaacccagtttagattcccgaccccccgaactgtgagataacatgcgtgtggcttaaactactcaatctgtggtactttgttgcaggggcaacaacaaacatacagacatctaactcagacccgaggccttgggtgggacccaggccccatttcctgagacacctgctcccacagcgacctggggtaagcagaagtgggggaggattctccagacaccccagactgtctccaagtagagcggagatctcgccagttaagcgcacagctgaggacagttactgggtgaagtggcctgggtctccgccttctcatgcccccaccgcccagaccctagaaggggagtggctgcggcctctgcaccctggccctgagggctcccagacccggcccagtggggcaccccagttcaccaccctcctcgccttaggtgagccaaagcccaggcagggtggagcctcacgcacactgactggcccctaggacaggcacaggtgacgcgggggtgtgggacccaggctatgactctggacataaccttcaaggctgtaaaacgagaaggtccatccccccaaaacacgcactcccccacaaccaccccctcccccccccacacacacactcccctgcaccacagatacacacattcctttcgctccccactcagacgcctcgaggcctcggcgggggaaccataggggcgcgaccagggcgcgccgaggggtgaccagagaggacacgcagcgaccttactcccgcctttcccgcaaggcgcgttcgccagcctggactagtgggcacgggccctgcgttctaataatcaccataataataggcgctgggtgtacagaggggacccaggcgacgctggcctccatccgataaccaccgtaacaggggctgggccgcgccgctcctccgctctaagtgttctttacatgcttcttaagttaccggcaggccagccgcccttacgagagcccctcacggacattaacccaattgagaagactgaacccagcatacgaacgttaagttgtcccaaatcgcagggctggcgagtgaggagcctgaattggaacccaggagcttctggaacccgctccagaattgcgctctcgaccggtttgtccgctgagagcgaacgggtgcgcgagcgccgcatccctgcccaaggccatcaggcaggcagcgctggggcccgggacccgcgcggagactccaccccgggatccgggaaggctcccccgagccggggtcggagctgcggctggaggggcctcggcttgaggaggatctgggagggcgggggctcagtcctggccaccaggtgtgaggggtcgggtgcggagccctgtgtcagacgcggcggtgaaggctgtagccctgctctccgggatgggggtggtactctcaccgcaccctgccccaagccgcagggagcccctggcgcccctggcgcccgggacccgccctggctggagccctgcggtttccgggagctcacggtcggctctgcgcccctccaccgccgggcctgggcctgggccagggactggctggggcgggactgcggcctcggggcgctgggtccctgcccctgccgtgcactgcgcggctccccgcgccgcagctgggcaccagcagcaccacggaccgcccctgtgctcgcccgacggcgccccgcggcgctttaagagacggcctggcagcccagccccagccgcccagaccggcgagaccagcctgcgggagcagccccatggcgggtaagcgagcctcgcctccccagcccagccccggcccctctgcgacccttccagcacttgcctccgccccgccgcccccgctggggtgcagcgcctgccctgcccggcctcggcgcgctcttggaggggcactgggatggagtagacgctgaggcccgctcttcgcggtcagttgcggcttaggaggtgtggggggtccggccttctcaccaccccacccagtgcagatccctgagacctgaatgccccgcggccgcacgtcaccctaagggaggcacctttttggcccgccccaggtggccagcggttggaacccagcgtctgagcacccccggggcgaagcctcctaggtcccgcaaatgcggacgtgtgagggccagcagcaatggggccttgccccctcttcctccccacctcgtccaccgcgtcgcaccaactcccctaagcgcgtgctcaccttgatagagggctaggggagggagcgggtgttagagaagagtccagccttgcagcaggttccagggccccagagggtagaggtttgattgcagaccagggggaaggtacctttcagggctttccttaactgactgcgtccacaccccagctcccctcctggcctcaacaggagcccaggggatatggaggttctggtgagggcaggtttgatttctactcagaagcgcaaggaaatggcttctttaagccagaatcccaagggcagggccagctgttttccaaggaaaactagaaggttctgcccagggctctcagaccctggggtaaacggcttctcctctgagagctggcggaacctagccagcagcatccctcccggaacccatccccagcaggcctgctcctatcactcctgagatcaaacccagaggcagggttgctgccctagttctgccccagcaggccagggctgtgagggagagtggccttcccaggcaggcatcatagtactggtggtctctgcccccagagcagctggccctggtgattgggggcaccatcggggggctgctgctgctgctgttgatcggggcaagctgctgtctgtggagaaggttctgtgccaccctcacctatgaggagctgcctgggacaccagccatggccaccacagctgcctccagtgggcagcgggacaggccctgccagccgcatgctaggacccaactgagcaggtgaggcaggatgtggggccaagtgcgcccctggaatttccctcagggtggggtcgaaaaggaaagttctgtttatgggggtgcctcttctatgctgcttcggtgctgggagctatcacaaagaaaccccagaaacctcacatcagctattaggcaggtgttatgaaacccatgttccaggtgaggaatctgaggctcagtgcacataagcaacaggtccagagaacacaattagtaagtggcagaacaggaatccaaacccagactggctgacactgtcaggtgctgtgttccttctccaaatcccactgctgtgtgtgtgtgtgtgtgtgtgtgtgcgtgtgtgtgtgtgtgttgcctggtatgggcccagaaaatggtgccctggcctcctcctggctcccgatggcttttcttcctccagcccctggtgctcaaccgtcctggctgagcgctctgagaccacaccattcacttgccacctacatgttgtctccctgactctggacaggccaccagctgtgccattcgtggtgcccccaacccttcaaggccgagattgggtgcccctgcacagtggagagtgggccgatgccccatgggacccctgcccggcatcagagctgctgcctcacacctccagcggcggccttggtgagtgtccttgccagggctgcccagaggtcagggtctgctcgggtggccccatctgctttcaccagcttggctccggaacacaacctgaaccagccagggatgccagggaccacccagggaccactctttctgggtgctttcatttatgaagtgcttgctgcaccccatgagggtgagatatggccttgggtgctgatttggagtgagacctcaccatgactctgagggggaggaattatcaccccattttacatagtcttaactgaggctgtaagcaacagattggaattggaacccaggcacgccatgtacagaacttgtgctgggtcccactctaggatgatgggttggttgaccaagaggacagaatggtaggggctgcaaacacagctttctgccacctctttgccctgaagatctaccaagagaccatcacaggaaccacccaataatcaccttggcccttctaatttgaagaggaagaagaaaggcaatgttttatcgctgagtcattccctagacgccatggaagggggctaggccaggtgatgggcactgtgtccttgaaacaggtcctgacctccaaggatgggggccaatcccagggggcaggactctgctggatccccagcctggccatgcaatgccttcatggtgagaaggcttcttggaggagctgcaccagagagaggggatgtgtttagcctggtgaggagagtggggcagatgtggtcaggctagctgaggctcagcagagacggatgggccaggatggggatgggtgcccagagcttgccactgtctcccatgcccctgccttcctctggcctgccagccctcccaccctctgtcataggagatgcatgtatggtgggggccatcaacccagagctgtacaagttcccagaggacaaaagtgagaccgacttccccgacggctgcctggggcggctgtggttctcggtggaatatgagcaggaggctgagcggctgctggtgggcttgatcaaggcacagcacctgcaagccccctcggagacctgcagccccctggtgaagctctacctgctgcccgatgagcggcgcttcctccaatccaagaccaaacgcaaaacctccaacccgcagtttgacgagcacttcatctttcaggtacagcttctggagcaggcagggtctggtgccctccgcgttgctgggaaggtgcagacctacaggagagcccagcctcctgtaccagccagggctctgcagcccccgggacccttgatgccaccagctctgctttacctagtctgctaggttaaggcctataggagctgatccctgatagaggggcaggggagagatttggtgagtggtgaccagaagcctgggcttccctgtcctgactacctggaagagagtgggtgaaaacacaattttagagcaactactgaatgccaggccctggcctatggggctcaggggaattatcccaaaggcctgaagcactatggggtttctggcaagtttatccaaggaaggcaaaagacaggcctcagcgtgaatgcagaagcttcctgtgctgtcagaggccagcgcggggcccgagtgccctcacagggtaggtgtggtgccttgctgcactctgggctggccggcttagggtctggaggtggagagtctattggggcaccgagccagtttcacaggggcctgggagccttagcaggtgactgggggcccttaggggaaggagtcatcgagacctgccaagaggccttggacaaacatgttctcaagagctgggtggcaagctagccaagaggtgaggttcagccagtcagctttcaggaggagtgtgactgcggaggccagggccatcacttgtgccttccgccctggctgagagctgggaagaggggtgccatcgggcctggtcccgggccgtctttctgaggccagggctgtgagaattcacaggtgaatcgctcttctcaagacatcagaatccaaggctgcagccttgctgacgtgcgacacgtcatgcttgcaggctaatttttcttagctcatcacttccccactctatctcgccccagcttgatccaatccctctgtggaaaagggagaaggggaaagaaaagaaaatcaatattaatgggccatctgctggaggtcagacactgtgattggggttttacaaccagagaggaagacccataatccccatttcacaggcgaggaggccaaatctcagggaggagagagctggcatgcccagctctgacagcagagacaggccggtgccctgggctcctgggcctttgctacagtgcagggtggtggcggagccacactcaccgtgcagccatgtcacttggtgctccggttaaacggcagattccaattcatgaatctgggctggggcccaagatcctgcatttctaacagggctccaagtggtggtagacgctacaggtcctcggaccacactctgtgtaccaaggtcctggcacctacccccactttccaggggtacacggctctgctgctgagaagggtcccctgaaaatgcctaggtttgggggatgtgggtccctggttgagacacccgttcccaaaagcacccatgtccagaataacaagtcacaccatcccatcccctacccccacgcctgactctggctggtgtccttgtcccccccaggtgtccagcaagaccatcacccagagggtgctgaagttctccgtctaccacgtggacaggcagaggaagcaccagctcctgggccaggtgctcttccccttgaagaatgagaccctagtgggggactgccggcgtgtcatctggagagacctggaggctgagagcctggaggtatggtcaaggtcaccatgcctatgccactgagcatcagctggcaggtgtgcacagggcccagcacctgctggcggcatcagccctcagcatcctgcacaccaccctacaacagtgactcagggaggagggcccaggccccaagcagcatgggacaggtgggaacggacctgcccctgggcagggagggcctgcttgaggtcctgttgtcacactggccatcagaccccctggagcaacctgaaatatccacatttggattcttatctaggttagacagctgtgagagatgacaccacaaatggtccagcccagggaaatgtttcctccagcccaccacccccaggaaggccccagctggctcagacctgggtgtgactccttagctgtggtccacaggactgcacaagccccttaaactctccagaccacagttgccccatccttaaaatggcagtggaactcaaaggggaccatgcgggtgtgtcgcatgggccgctaggaggaagcgggaggctctctgggggttctgtgaccccttcagcacttgccagagtaacaggatggggtgcttccatcttggcctccccagcccccctcggagtttggcgacctccagttctgcctcagctacaacgactacctgagccgcctgacggtggttgtgctgcgtgccaagggcctccggctccaggaggacagaggcattgtcagtgagttcctccctttcctcctggggaaggtcccacccaccgagcttacagcctggggctacagtccaacctcatccctgaccatccagtttctgcttgcatacacctatcatggagtgctcactacctcacaagacgtgctgtccctcggtcgacagttctggtgcaggaagcctcttcctgtgttgaacccaaagctgcatctccttggcctcccctacggagggttctaacccagccgcaataccaggccctgcccctcctgtttcccgaggcagcgtcttggctctttgaactgtcctgcctgcctccacctccacctttccatcagcggcatgggtccagttcctccagggtgaggcccgcacctccctccccacaggggaagagcccccgactcaatgggcactgatgcttggcctcccagaatacaggagctgcagaaggggaggccttggttcaccccacatgtcccaccccatttgggctcaccccacacatcccacccatcccagtgaggtggtggtggtcagccacctgtttgtgttcacatctggggtcaccgtaagccaggcaggatccagaccttccactgtgactctgaccctcacccaccaaatcttagccctctgtacaaggtgtttaaggggccccagggggcctgggggcccagtgagcagccccccaacagggagggacaggcttgcggtgctaggctctggtaaaccagggcctgcaggagccgtgggtactttcctgatgcaaagaggaaggaaaaggaagggagcggagccccgcctgggccgcagggcagtgcactcctcagccggcttcctctggtcacgccggcggggccgcagcactgtgtgaggggtggggccctggcacctagcttgggcacgtgccctcctagccggacctcccacaggcaggggctctgctcccacctgcctctgccagcccactagtgctcaccgttccctaggtgtgtttgtcaaagtgtctctgatgaaccacaacaagtttgtcaagtgcaagaagacttcagctgtgctgggctccatcaaccctgtgtacaatgagaccttcagcttcaaggccgatgccaccgagctggataccgctagcctcagcctgactgtggtgcagaacatggaaggggacagtaaggccacaccctaccctgggctgctgggatggggaccacgaggggctgccgagtgttcaggcagagtgagtgcctcctgtcctgacctcagaaggagccgtacgagctccctccctggttaaggaaactagtgctcagaaaggctgaaatattgcccaaggcctgggtttcaggcccagctttagtccagttgagctctgtctgtggcaccctagaaacaggttaagcagccgggcatgctggctcacatctgtaatcccagcaccttgggaggccaaggtgggtggatcacttgagctcaggagttcaagaccagcctggccaacatggtgaaacgctcatctctactaaaaatacaataattagctgggcgtggtggcacacccctgtaatcccagctacttgggaggttgaggtgggaggatctcttgaacccaggaggcgaggctgctgaatctgtcaaaaaaaaaaaaaaaaaaaaaaagggccgggcacggtggctcacacctgtaatcccagcactttgggaggccgaggtaggcagatcacgaggtcaggagatcgagaccatcctggctaacacagtgaaaccacgtctctactaaaaatacaaaaaattagctgggtgtggtggctggcgcctgtagtcccagctacttgggaggctgaggcaggagaatggcatgagcctgggaggcggagcttgcagtgagccgagatcgcaccactgcattccagcctgggcaacagagcgagacttcgtctcaaaaaaaaaaaaagaggttggctgggtgcggtggctcacgcctataatcctagcactttgggagaccgagaggggtggattacgacatcaagagatcaagaccatcctggccaacatagtaaaattctgtctgtactaaaaatacaaaagttagctaggcgtggtggtgcacgcctgtaggcccaactactcgggaggctgaagcagaagaatcacttgaacccgggaggcagaggttgcagtgagccaagatcttgcaactgcactccagcctgtccacagagcgagactctgtcaaaaaaaaaaaaaagaaaagaaaagaaaaagaaagaggttaagcaatggcctctgctgccctctcctggagcaaatcacccgagagagtgggaggggccaggcctgccaccagcccagggacctggtgctctgaccttcctcgtgccctccagatgagactttggggttctgggcgagttctgtcagccagctcccacactgccccacaccccagcacccactgccactctggggaaacagagccatcaggccgtggctggccacatggcctggacttaagacccttctccacggtggccagtgaatgttactgctgaatgtactctcggatggccgaggccttctttctagaggggccctttcctccctcagctctttggcataaggtagacttaatacggccccacagaagggtgtggggcagagctggtggccctcaaggagagagtctttcagggctctccttcctcccaatctcccagggggagaagcagcccttccagctgcagagcaaaggcagggcccctttggggcctgtcagctcccactcagagaggaggggagttgctacttcctcctggggaggaggagggaggaaaggaggtcactggggacggggcttctgtgctcaggagcacaccggtgctctccctcccctgcagagagccagcagctgggccgagtggtggtgggcccctacatgtacacccgcggcagagagctggagcactgggacgagatgctcagcaagcccaaggagctggtgaagcgctggcatgcgctctgccgcaccacggagccctgacccttcgcccagcaccgcggttccgctttgggagccgaccatcctcgcagttgcatgtgacagccacagccacacgcatggacgtttcatccaacagctccccgagctgccagccagcccgagccaggaggacgtgagtgctgatatgcaggagagaagaggggacaaagaagccctggcccggtcagcggctctggccatacagccttccgacacactccctcctccttatctgcggggctgcctgggctcggaatcccggctcctggtcctcacagccctgatttggaccagaatctcagatgctcagaagaaagatcctgtttagtgatgacccagctctacctgctgaatggacctgcagggtaaacttgggtgcctccatctgggaaagctgatgatgtgttcatgcagtcgatgaccctcactgctttttcagccagggtttctctgccttctgcctggcagagaaaacacactgctatggggaaaatcacagggagggcgctgtgaccagcgcactcaggcaccaagtgtcggcatggctcactgtgctgggtgaaggcctccccgagcattaggtcctccacggggctgtgtcaaatgccctcccacattgtatcaagtctgcccatggcccaccctccccacagtccaaaaccacacagccctggttctccagctgttctgctgctgtttctgtgctctccctgattaagagcattcagttcctgggctctccctttgagcaggaaatggtgaaagcatgtggctatggtatagcccacagggctgagattgctgtgttgcagtattgatgtaaaatttgttaagaaggaagtacccacagatcactgccatcaactccccagaagttgcactcaagctagtgagcagcccttgtgcttgtcacagttactgtaacaggtagtgtgtatttgcacctggcatcgtgcagcctgcacgtcaacacgttgttttgtgtaactagaacagcacatggaaccactatctctttctcttttttccttctttttcttttttttttttattttaattttttgagacagagtttccctcttgtcacccaggctggagtgcaatggcgtgatctcggctcactgcaccctccacctcccaggttcaagcgattctcctgcctcagcctcccaagtagctgggattactggcgcccgccaccatgcctggctaattttttttatttttagtagagacggaattttaccatgttggctaggctggtctcaaattcctggcctcaggtgatccacctgcctcagcctcccaaagtgctgggattacaggcatgagtcaccgcacccagcccgaccagtatctttttcttatgcagtgaaacaactttagcaaaagaggcaatgaatgttatactgagtttctacctctttaactccacctccaatttctgtcaatctacaaacacaagtgtcgcctcgcagtgtttcgtatgaacagaatatcttgtgtttgctttttgtcacttatttcacttgcacattttttgtttgtttgtttgtttgtttgtttgttttttgagatggagtcttgctctgtcgcccaggctggagtgcggtggcgcgatctaggcttactgcaagctccgcctcccgggtttacttacaccactgtcctgcctcagcctccggagtagctgggactacagacacctgccaccacgccctgctaattttttgtattttcaagtagagacggggtttcactgtgttagccaggatggtctcgatctcctgacctcatgatctacccgcctcggcctcccaaagtgctgggattacaggcgtgagccaccacgcccggcccacttgcacattttcaaagtagtccgcaaagctgtagtttctaatagcttcatagctcacatgtaataggggttctctgtgtgtttatagagcaggctactacagtggaactgtttctgtttcatctgacatccggatagatgccagccacccccacattccaaggtgagatttctgactagcagtgacttttctagggccgcttggaaaagttgataagtatccttttctgcaggacagagtagactggtatctctgactcatccctgaaaaatctaaatggcaagagactagctggctctctgctctgatggggaggaggttgttgtttgggctgttctctacagacatagtcagggcaaaaagcatacgcatgcttcccatggaccagagaaacctggcctgggttgtctcaaatcctgtccacaaggcaactccagaagaaagaagccctttacatttccataaaacactttagaatcagctagtcaatttccacaaaataaagtgctagaatttgattggatttaattgattatgtagaacaatttgggggccatttgacatcattaaaatattcaatcttcctattcattaacatggtatatctcttcactttaagtcttttgtatgtttctcagaactatttttgtggttttcagtaaagtgttcttgcacatccttcaatagatttattcttagacgttttatatttgtttatggctagtatatacagattctgttgctacaaaactatgttgaccttgttatccagtgagaggctttgtgacattcatttaaattgtaataatttgcagattatttttgtataatcatgtcctctgtgaatgacagttttatttcttcctttcttaatctttatgccttatttagctcttgccaaactgcagtggctgagcaattggacaagataaagaaataaaagtgatccagatcataaagaaagaagtaaaactatatctgcacatgacataatcttgtctatggaaaatcctaaggaatccacacacaaaaaaactactagagctaataagtttggcaaggttgcaagatataaaattggtatacaaattgcagtggctaggacctccagcagaatgctgactataagtagtgatagtgggtattcttgtccatcctcaatctcaggggtggtgggtgtggcatgtggagagttgtcaatattcaccatgaagtttgatggttgttataggatttttaatgtactcattaacatatattctcaagctgttaaaaagatttttttaattacaaataaggttaaatttctctcaaatacttactctgcaccttttgaaataattttatttttctcctttattctttggatgtgatgacttatactaattgactgttgaatgtcaaaccaaacttaacattcttgtaatagaaaccagcagggtgtgtacacttttgtgtgtgtgtgcaggtttatacacataaacacaataatacttggacttatttatttaaaatttagatttattagagggagcatggccataaaataaaataaaataaaatttagatttaagtcgagctcagtggctcacatctattatccccgcactttggaaggccaaggcaggtagattgtctaagctcaggaatttgagaccaacgtggtgaaactcggtctctacaaaaaccacaaaaattagccaggtatggtgtcacatgcctgttgtcccagctacttggagggctggggcaggagtattgcgtgagcccgggaggttaaggctgaagtgagtcatgttcacgccactgcactacagcttggataacaaagcgagactctgtctccaaaaataaaataagtaaataaataaataaataaaatttagatcaatttgctgttatatttttatataaactatgtttatgacataagtataaacaaaaaaataaaataagtaaataaataaataaaatttagattaatttgctgttatatttttatataagctatgtttatgacagactttcctataatattcttatcataatgttcttgcacttgaaagaatgtgcattctgcagttgtgtgcaggtgttatgtgtatttcaactgggtcaagtttgttaatcaggttggtcaaattatctacgtctttactgatatttttgtctgtttttctataaattactgagagaggataaagcctgccactgttattatgaatttgtttatttctcctttgagttttgttagtttttgttttatgcatttagaggttgtgttattaggctcatacccatttaaaattgatgttttctggtagagtgaacctttattatgtgaaatggctttctctaccactcacaatggtatttttttcactttcccccttatttttgaattttcaatgttcttataatgatgtcatgtctcttgaatagagttgttttaatcaagtctgtcaaattttgtcttttgtgtatttcgtgaatttacatttattgtaattactgatatagttgtgttcataaataccatcttactacttgtttccatttgtcttacccatttttgtttttattttttcttttctgttgctttctttctgattatttttttaattccgtttccccccctaccattggttttacttacacattcttttataatttctttagtggtttcctccacagattacaacttctgtacattattataatctaatacaaattttactttttattgtttcccagacaatgctatgatctcacaatactcaatctctatttacctccattctactcttgcatgtatattattattactcattttaatttcacatatattttacacctaacgagacattattattattgctatgtgcagtcaatattcatttgtattcacccacatattcactctgttttttttttattatttcctgcatttctgtgattctatcatagatcagttttcttctacctgaagaattccctttagtattttttgtgtatgcacatctgctggcagcaaattttctcaggtttttttgtgtttttttgtttgcttgtttttgagacagggtctcactctgtcgcccaggctggagtgcagtggcatgatcatggttcactgtagcctcaacctcctaggttcaagcagtcctcccacctcagcctcccgagtagcgggactacaggcaggcaccaccatacctggctaattcttttgtattttttgtagagaagggatttcaccatgttgctcaggctggtctcaaactccagagctcaaacagtctgcctgctttgacctcccaaaggactgggattacaggccacctcacccagcctttctcagtttttgaatagaaacatctatttcaaattcatttttaagtatattttgtgaatataggattacaggttgacacttttttctttgaggaacttcagaatggcactccattatcttctcacttccatcatttctgttgacaagtgattttcagtgctattgtttctcctttgagagtaatgtgtcagtaacatgcactggctcacgcccgtcatcccagcacccttgagcccaggagttcaaaaccagcccaggcaacagagcaagatcccccccctctacaaaagaaaacgacaggagggaggcaggaaggaggagagagggagggaggggaaaagaaaaaagaaaagaagaaatgtgtccctcctacctgcctctagctgcttttaatgttttttccttgtctttcatttgcagcagtttaagtatagtgtgcctgggtcgggtgcggtggctcacgcctataatcccagcactttgggaggccaaggccagtggatcacctgaggtcagaagtttgagaccaacctggccaacatggtgaaaccccgtctccactaaaaaatccaaaaattagccaggcatggtggcgcgtgcctgtaatcccagctattcgggagactgaggcaggagaatcgcttgaccttggggaggcagaggttgcagtgagctgagatcgcgcgccaccgtactccagcctgggtgacaaagaaaaactccgtctcaaaaaataataataaaaaaaaagtatagtgtgcctggatgcagttttgtttttatttatcctgcttggggatcataaagctttatcagttttggaaagttctcagcctatatttatttaactgttccttctgccccatcttcctcccttctaagactccagttacatatgtgttaggcctgttcaccacttcccacaagtatcttatgttctttgctgtattttccatactctttgtctctgttcttcagcttagagtttttattctgtcctatattacagttcaaagaatgttccttctgctaaatctaattgtagttaacccatatgctaagtagttaatttcaattattgtatttttaagttttaaatttccatttcattctttcttgtagattccagttctttgatgaaagtctctattccacccatcaagtctgtgtctgataacaccaatatctgggtcattagtggctccgttttgttgtgtctgttttcccctccttcctgttttgtggtgtgtttgatcacttattgttgaatgctaaccattataataaattttagtggctccaggaaacatgatctgaaaacaatgtctgtctcaagggagggtttaccatgtcatctgatagacagagtgggaagattttaccttaatccaatggtaccgaactgactagagtctatgttgcagtttttggaaggcttcatctccatctctggtttgcccgtctatctagagtgtggtcctccaaggattccaactgagtgtctgatgtgattattaggcttcttttccttggtgggtcctgaactccaacttttatctcattaatatgacactgccaaaacctgctgcttttcatagcctttctgcatagcttaactcagcagatgcctcaaggggaaagtgttccttttctgtgtctcccttctacatgatatcttggccccttcagttccagctgccttgacaacctcagtctccatttcttgtctctccagctgaagactctgctgcctttgctgcctcttagctatggccgtctgcccaaatgctcggcctcttagctaaaatcagcacgtttcctgaagggaaaagtagttcacagagggccagcttgcctccttgtgtttttcttcttttgagattatgacccttcaaatgtttgttaactgggaagctttccaaaaactttttaaaaaagttttctgtgttttattcagcctttccagttgttcttggaatgagtgttggtctgcctcaagcagaaaaaaaattctcagaattcttttctcagaaaaaggattctcagcagagagtgattttatacagggaatgggattaaacaattcttgggaaagctggtgaagccaacgagggaacagttacttttatcagtgtgcaatttttttgctataatggtgcataacaactaatcacaacatgtcaatgccatacttaaataagcactcatttctaacacatctgtgggttggctggaggtggtctgagctagggtaggcaactcactttttttttttttttttagggtttcactcttgttgcccaggctggagtgcagtggcgccatctcagctcactgcaacctccgcctcccaggttcaagtgattctcctgcctcagtctcctgagtagctgggattacaggcatgcgctaccacgcccggctaattttgtctgccttccttcctttctttcctttctttctttcaacggagttttgctcttgttgcccaggctggagtgcaatggcatgatctcggctcaccgcaacctctgcctcccaggttcaagcgattctcctgcctcagcctcccaagtagctgggattacaggcatgtgccaccacgcccggctacttttgtatttttagtagaaacggggtttctccatgttggccaggctgatctcgaactcccgacctcaggtaatccgcctgcctcggcctcccaaagtgctgagattacaggcgtgagccactgcgccaggcctaattttgtattttttagtagaaacgggggtttctccatgttggtcaggctcgtctcgaactccggacctcaggtgatctgcctgtctcggcctcccaaagtgctgggattacaggtgtgagccactgcgctgggcctggcaactcactttcaagctggctgggcttggctcctcacatttgtgcattctgaacacaggctgcagggacagctgctacccccagggaaagctcttttcatggtgaaggcagaagcataaaaaggcaagctgcattgtgcagatgcatatctgtgtctctccttatgttgtgtcatccaatatcccattggccaaagcacgtcacatagccaagctccaaatcaagggtcagagaagtaaatgatatctttttcctgaggggaactgcaacactacagggcaatggacacagccacagggaggggtgaagaattcaggtggacaacgcaatgaaccatgctgatgtttcctggagctgggatcttcaggaatttgtgcttggctgtgcccatccagtcaccaaggaggaacccccctactgcagagctgcttttgggcctcgatgccattgttgccaaactgacattccatgatgaaaatggactgtaatttgtacagctatttgccagttacgtttttgctattttgcactgtggaaatctttgcccaaattactgcaagagtctcgagcatcctgctgtcataagtgcagagtcaaaggaagaaaacgatgattttttaaaccatctttctgctttctagtctcatctgagtgcctcacatttggcagaatcaacctggaatcctgctcataagactatcagggaaatataattcccagacttccatttccagaaaaatgtaataaatacttttaaaggggatggagatggtaccgtgtgctaaccccactctgagacaaacctgggtcacaggaaccatagggaagatgtctgcagtagaaggggacctcgaagtactcaagtacttggctcacaacagcactattcacataaagcctggcctgccccttggtgacctccttcccttacgcctctagactctactaggtgatcagaaatccctgcaagctagttggggagggaagagtgaaagtgaaaaatggagaggaaacactgctacccgcccaatgcctggagccaaatgcaagcctgggccaggcttgggggaggaatcaagaggaagcttaaacttaaaatgaaatcgaaagtttagactcctacatgggattggacattttaaatgctgaacagagcctatttttatagctagaagttacaggacacatttttggtcaactgagaatgatccaaaaatcatgtgaattttgtgatccagaaagtcacagaacatgccctagattttatcccaggggcagggaggagtgacctgcagagcaagtttgaattggtaaatagaaaacaagaataaaatagtttgctgtttacattccataagcctggctctttcaacatcatggttatatttcttggttgaatttagtatgccactatgacgccggattgtgatatttgcctaggatgttttgtcctaatatttagtatggaattatttgcccaaatcacctgcccctctccacttgtagctttatttcaagaggtatgtttctcaaagtggagtgactgccagagtgggagaaaggagctagcccttaccgctgtagtaggtctttgtacatcagcttggtaaatctgcaaggccccccctcttcccccctcccccccaaccccccccccaccaggagccttccccacgtgtggacaagagagatgggaggatccgggaggatgtgccgtttctcagggtcccacagctagaaggtgatggagctagaatttaaatcagattccaaatgtctaaaaatactgtcattatcacatattaccagagacacctcaaaaaagacagagacgccctgcagggccgcaacattcccgcagcctggtagggtctgttgggggccccatgcctgtgagagccgctcctgccggtgcagcaccggggaggctgtgcattcaacgagtccttcctcccttctcctttcattccattgctgccttccttcctcccttccccctccgctccttcccctagaccttccttccgccctccctaccccccgcacgtctctccctaccgtccttctttctgtgtgaattatctgttcatctccattgctgcagtaccgtctggcaaatcatctgcttggatgctcctggctttttgagaatcggctggcatcagggtgctgactgacaaacttcccggggtctgggcactgtggggacggagcctgcagacggcggtgtccccgctaggagagccgtggggacgtgattaacaggtcaggccgggccgcgaggtggcggaggggccgcgcttgcgggcgtggggtgctggcagagcgcgatccgcggcctgtggcccgcagccggacccgagcgacagcctcccgcagcgtgtctccagcgccctctactgttcagcatcctccctgccgcgaggggagccgcggaaggggattctggctgtgcccacagagcaggtattaaaggatggatttggaggtgcgaggccatacattgacaaccggtataccatgcgtcccaaaaccttcccttgtgtccccttccaaacactacctctccctccccaccaaaataaccaacgacctgatttttatggcaaacactgcttttaccacctaaccatgcaacttctctctctctctctctctctctcacacacacacacacacacacacacacatatatatgtatatatatatatgtgtatatatatatatgtatatatatatgtatatatatatatgtgtatatatatatatatgtgtatatatatatgtgtgtatatatatatatgtatatatatatatatatatgaagcctgttgtgattttgattgggattgcattgagatttttttctttttccatttcttttttttttttttttttgagacagagtcttgctctgtctcccaggctggagtgcagtggcctgatcttggctcactacaagctccgcctcccgggttcacgccattctcctgcctcagcctcccgagtagctgggactacaggcgcccgccaccacgcccggctaattttttgtattttttttttttttttttttttagtagagacggggtttcaccgtgttaaccaggatggtctcgatctcctgacctcatgatctgcccgcctcagcctcccaaagtgctgggattacaggcgtgagccactgcgcccggggttgcattgagtttataagtcaattcaggggagaattgacatctttaaaatactgggtcatctaatcagttcacatggtatgtacttctgtttatttacctcttctctcatttctctaaataatatttaaagtgtcatggacatctttcattaaatttttccccagacatttgaatttttatgctaccataaatggtattgttttaaaatgttttattttctaactcttgctggtatacagaaataaaattggttttcctattttgaccatttattcagtcatgctaaactcactaattctaataacttgtctctggattcttttgagttgttaatatacatacatagttttgtatcttaggtccaatcttagtatttttatttcaacttttttgccttattactcttgttaggaataccaggaaagtattgaatacaagtgatgataatggacatctttgtcttatttctgttctcagaaatgtttccacatttcattattaaggaaaatatttaccatagttgtagctccttgagataaacagtgttaaaattttttggccactctccattgatttaatgtatagttttctaaaaatgaaatattttacatactgtttctgagtaagattttttacccaatgcgctgtaaacaccaaaatcatatatttttatatagttttacttggcttaccttgtttttttgctttaacttgaaaaatatttccctgttaggccaggcgcagtggctcacgcctgtaatcccagcactttgggagagcgaggcgagaggctcacctaagcctgggagtctgagaccagtctggccaacatggaaaaaccccatctctattaaaaatacaaaattagccaggcatggaggtgcatgcctgtaatcccagctactcgggaggctgaggcagaagaattgcttgaacctgagaggtggaggttgcggtgagccaagatcgtgccattgcactccagcctgggcaacaagagcaaaactctgtctcaaaaaaaaaaaaaaaaaatccctgtttattctttttttataatcgttttattgagatataattcacatatatgattcatccatttaaaatgtataattcgatggttattggaatatttacatttctgtttaattccctcaattaatttttacatcaacttgtcaacttgtataggccatccctcagggactttgtttattgttgaattaactctgtatagtacatcttcccaaacagcaggagcacagtagagtgttccactacttcttgtctccttttatttccctcatgatatttaaatcatttcctttcaataaattaagctcttaaagtttttggttttatctgtgagcatgattatttttatttagaattatgtattactgttatatggtaatataattttgtaaatttgttatgtgtaattaatatattactagcatattttttatttcctgggattatttttcttaatatatattctagttattcaaaatagtgacattttaatttatttaagacttcttgttacgattacatacgtatttttattctcaaatcatatagccagcatttctactgctgaacaaaatgctttgaaatatcaataatacatatatctgacttttatctagaatacatatgtctgatcagtaaaaagacaaacaacccaataagataaatgtgcagatgacttgagagacacttcacaaatgaaggtatacaaatggccaatgagcacatgaaaagttgtgcatcattagtcatcagtgaaagagaaaccaaaaccaggaggttccactttacagcctctagaatggctacagtgaaaatgactgacatctcaaatgttgacaaggatgtacaacaactggaagcctccgttttggctgcggagagtgtaaaactgcacaactttggagcactgtttggcagattcttctcaagttaaatatatacctatccaataaactgacaatctcagtcctagctatttaaatccctgccccaacaaaaacttatgtccacaacaagacttgttttaaaaatgtttttagcagctttattcataatagttcgaaactggaaagaactcaaatgaccttcaacaggcgaatggataatatattcacacattgatatattactgaacaataaaaaagaataaactgctgattcacataaaaatatggataagcctgaaaaacattcttaggttaaaaaaagccagttacaaaggaatatatactgtatgatttcatttacatgaagtccaaacaaagatcaaactagtgtatagtgatagaaatcagaatagtggttggccatcatggatggaggagactgactggaagtggggatgaatgaaaattctagggtgatggaaatgctccatatcttgtttggggttcagttacatgaatgtatatatttgttaaaactctaaattgtacacttaagacctgtgcatttaactatacgttttcatgcaatttttttttaaattccaagaaaaaggatctgattgacccaatttgagtcaggcatcctactgccttgcataatcagtttttgccaaggaatccaaacaagcagtatagacgtgacctagagaaggggcaccagaatgggcttggctcccacccacaaagttccaatatctcctacatgatgtcagttttggggaccaaaaccatatcatctttttctattatttggatgtgatctttttatttatgtatgtttgttgttggttttatttttttagagacagggtctcgctttgtcatccaggctggagtgtagtggcagatcatagctcactgcagcctcaaactcccgggctcaagtgatcttcctgcctcagcctcttgagtagtgtgtcaccatgcctggctaattttttttttttttttttttagtgttttatagagacaagatcttgctatgttgtccaggctggtctccaattcctggcctcaagcaatcctcccatctcaggctcccaaggtacagggattacgggagtgagccaccacaccggaactgatctttctaacacagggaaattgtattctttagaagtggaggaatatttcctagtaatttgatcaagtaaaaataattataataaagaaggtaaaatcaagccctaattccccatgtaggggaataatatcattttggtaagattcttccagacagtatgattaggatgttacataaatcaaactgtgctatatacagtatgcagagaaggaaattccttagcttgtctaaagtctgatagtgtgaagaatttgctgacctgctctccatgcctgtctgagcacgagtgaagtgaatcagagagagattgcaagatggagaaaggaggtacagttggagagagtggagggggcaggaaagaccagacagagctgcatctcccatgaaaacaactgtgtacataagatagagtgagtacatagagtacatagaagagtgagctctgaaagaactctcacatggaccccagaaagaggagtactcaacgcctgctgcacagaaggcatcaacagttaagtactggctagaaaagcggagtccatcaaaggagaggaccacagtggtagctgcctggtaagtaccactgtcccctttccttcttttctccctccccagctcatggaggagctaggcctcaggaagctgggaaggaatggggagaattcacctcggtgccagttcacgccctccctccagctccaacagctggagtcaaaggaaaggaagggtgcacctatctcctccccattccaagtccctttagtgactagctggacatgctctggagaagagcaaaatgaggttggaatttaaacaataccagactttctaaaacacaatgcctgggaagttatgtgaggcatgtgagacatgaggggatggaaaagggattcaacagagcatagttgaaatcaatgatttaaaaaaacaaaaaaactggctgatggctcatacctgtaatccaagctctttaggaggctgaggcaggtggattgcttgagcccaggagttccagaccagcctgggcaacatggcaaaactccatctctacaaaaaatacaaaaattatccaggtgtggtggcacatgcctgtagccccagttaccaaggaggctgaggtgggaggatagcttgagcctgagaggcagaggttgcagtgagctgagatcataccactgcactccagcctgggcaacagagtgagaccctgtatcaaaaaaaaaaaaaaatttccatagttaataccctttaaatgtggactgctaaataaagctaaagctaaggaacattaaagaatactttattaattgaaaaagcatgctcttcttaaatagtaagccttaaccactgaaaacatgtccaaatgatccataaattcaaagcaatctcattaaaaatatcaatgggataaaaatgattctaaacttatctcaagaacagatggcatgcccactaggatggctataatcaaaaagtcagataataataaaaagtgctggtgaggatgtggagaaatcagaactccaatgcattctcatgggaatgtaaaatagtgcacctgcattagaaaagtttggcagttcctcaaatggttaaaccatacaacccagcaattccactcctgggtacatacccaagagaaatgaaaatatacatccacacaaagacttgcacacaaatgttcatgatagtacaattaaaaataaccaaaaagtgggaaaaactcagttggccatcaactgatgaatagatacataaaatgcggtatatccatacaatggaatattatttggcaataaaaacaatgaagtagtgatacatgctacatgtgtgaaccttgaaaacactataccaagtgaaagaaatcagttacaaaggaccacatattgtatgattccattcatgtgaaatgtcagaatagtgaaatctatacagccactaagtagaagagtggttacctagggttgggggaaagggggtgggtatggaggagcgactgttagctcctcttaaggaagagctgtggggtggtatagttaatgtaactatggatgattcttttgggggtgatgaaatgttccaaaattgagtgtgctgatggtcacacactctgaatatactaaaaaacactgcaacatatactcttaatggggaataaaaaagaacagatgggcaaagatgtctgagaaaaacaattttaatgaagaaaaatatgggggtacttttcctatcagatgtaaagttataataattctaactgtatggttctggctcagcaataaatatagaacaatgaaacagactagaaagtccacaggtaatgctagcaggaataataatttcatattataataaagatcacatctatgtcactgatgggaaagaaagaaatcaatagtgttgggacaaccagctgaccattttaggaaaatgaatcagttagatccattcataccatgcactaaattttagataattaaagatttaaatacaaatataacaatcataaatgtttcagaaaattttttgaagaaaatgtgtataatcttatagtagaaaagaagctatctaggcatgccataaaatctagaaacaataaagaaaaagattgatgggttgatccacgtaaatatttatgatttctgcatgtcaaacatatataacaagcttgggaaaaatgtctgcaacacatgttaaaaattactaactttataaggagaacatactaatttaataaaaggcttctcccacataaaaatggtctaaggtaaaatatgaaaaagcaaactgcaaatgactgataagcatatgaagcaaatgtacaatcactttagcaataaaataattcaattaaggctgggcgcagtggttcacacctgtagtctcagtactttgggaggctgaggcaggcagatcacttgaggccagaagttcaagactagcctggccaacatggcaaaatcctgtctctactaaaaatacaaaaactagctgggcatggtggtgcacacctgtaatcccagctactcaggaggctgaggcaggagaatcgcttgaacccaggaggcagatgttgcagtgagccaagatcgcaccactgcactccagccagggtgacagagtgaaactgtgtctcaaaaaaaaagaaaaagaaaaaagaaaaagaaaacctcaaaaaaaattccaattaaaacagataaccttttttaaacctaacaactagtctttcacttatgccattcagtttagagagagtgtggaaaacttctgataggaatatatttcaggataacctttctgagaacattttaaaagtaggattcaagagcacacacaaatgatggaatcctgtgtagttgatatgatttaatctatgttgattgatttggaaagacgtatatggcaaattgtggagtaaaaaaagtacacactagatactggcctatatggaatggtcccatttatgtaaaattgtgtatgtgcatgcacagatctgtcttctatcagggtatctggaaaatgttcaacaaaatagtaacaatggttatctgttttgttttgttttttcagagacagggtcttgctctattgcccaggctggagtacagtggtgcaatcatagctcactgtagcctctaactcctgggctcatgccacacaatcctcctgcctcagcctcctgagtagctgggactacaggcatgtaccaccctgcgtggctctcgttatctgttgatactggaatttctgcttttttcctggtacagatacatacatacaagtactttgaccccaaaattctattttcttagaataaattcccagaaggaatgaaagatgtgtgcaaagactatcaatgagaatgttggccagacgtggtagtctacacctgtaatcccagcactttgggaggctgaggcaaaggggatcacttgaggccaggagtttagaccagcctgggcaacatggcaaaaacatgtctctacaaaaaatacaaaaagtgtccaggtatggaggcatatgcctgtagtcccagctactcataggaggctgaggcaggaggatcacttgagcccagggaggctgaggctgcagtgagccatgatcacaccactgcactccaacctggttaacagaatgtctctaaaaataaaataaaataagatgtagatacatgcaggaggctgaggtgatggatcacttgagcccaggagtttgagtccagcctgggcaacattgaaagactatatattttaaagcagacacatgtacaaaatcatacatgcataaaacaactgaaggaatatctattaaaatgttggcagcaattagctttggttggtagaataacagaagggttacttttctcactttcattcatccatattttccaaagttaaaaaaaaaaagaaacggcctggtgcagtggctcacgcctatagtcctagcactttgggaggccaaggcaagagggtcggttgagcccaggagctcaagaccagcctgggcaatgtagggagaccctgtctctacaaaaaataaaaaatcagttgttgtggtctgcccttatagtcccagctaccagggaggctgaggtggaaggattgcttgcgcccaggaggtagaggctacagtgagccataattgtgccactgtactccagcctgggtgacagagcaagaccgtctctcaaaaaaggcaaaacaaaacaaaacaaaaaacaaggaacatgcgtttttgtttaaaggaaaacgttttttttttaagtttataattttttttttttttttaaacagagtctcactctgtcacccaggctagagttgaactggcgtgatctcagctcactgcaagctccacctcccaggttcaagcaattctcctgcctcagcctcccaagtagctgggattacaggtgtgcaccaccacgcctggctaacttttgtatttttagtagagatgaggtttcaccatgttggccaggctggtctcaaactcctgacctcaagtgatctgcccgcctcagcctcccagagtgctgggattataggcgtgagccactgtgcctggccttaagtttataatttcttaacatggtgtttaattaagcctattcacaaatattcttaaataacacaccaaaataatttacttatactctaataggaaagattctacattaggatgcagaatctgaaggaaacaatcttcaatttcttgacttagacattcttggtaacagacccacacagtaattaggtagcacttatgtattgtgatattacctggggtgtttataagctgatcctttaataagctagactaagtgcagtaaatcagctcactctgcaaccaaccagtcccacctcctaactgctcctgaactgcaaagaccaaaagcctcagagaagacatatttcccaaactttcttgcagctaaagctctcagcgtgaatcatgttccatcaatgaaacacacacacatgtgcaatatggaagatgagtgaaatccaggctatcttcctgaagctactgttcctggcaagtgtagctgtggggactgagttttgggcagcagcaaataactcccagcttccatgtgcttgagagtcagttgctgggatgccagcagctgcatcctcagtctaagattgcagccaatgatgatgttttcatgaatccaccgttcacgtggcagcctcctggagctcagactgatgcctgctcctccagccttccaatacctttgcaaacacctgaattccacattaatctctctctgtttagaatacccagagtggcttgtgtttcctgggctgaaccctgcctggtaagtccattttaacaggcttctagatctttcctcaaaaactgtaaagctgatgatggttttgaaaaaaatcacgatttcttaacaacgtggaagcagagaggtcacctttagcaaatgtatgccttaagtgggtagaattcacttcttaataacaaatcaggttcaagacctccaaagacataatgacaattaattggcaaacctcatcccctctcacacatttctcccctgttgacattaaatcaagggccagaattaagctactgataaagacgaacactttattctaattgttctatgattcatgacctgtgttccaacacctagaaacccatcaggatacaaatatatcacttaaaataaggcacatagggatggttagtttttctgtctcattctatattgttctgagaaattacagatattttcttctaagaaaggcatgatcaactattcaagttttgctgaatctaaggtaatgtcagaatactcttaaacaacttacggcctcagatcccagtagtttagaattctagggacgatgtaaattcataatcactgtgaaaatgttatcctatcaaaactctgtagaaacatctatgcttttgcaataacagcgtaaaagacctcttctgatgagagagagagagagagggagagggagagagaaagaaaaaaaagaaagaaagaaagaaagaaagaaagaaagaaagaaagaaagaaagaaagaaagaaagaaagagagaaagaaagagaaagaaagaaagaaagaaagaaagaaagaaagaaagaaagaaagaaagaaagaaagaaagaaagaaagaaagaaagattagggagttggggtaaccaggtaatttaggccaatggattcaactgtgccttaagctggtactaccctcatttatgtgagtcaatcaagtcccccttttttgctcaagctactctgagttgggtttttatcacttgcaaccaagagtcatgactaacaaacccatcctactgttacctcttttgccttggctctgtattccacacagatttaatcctggcgctgatataattttgtttaaatatttcttcaccagcttgcctgtgaacttacagaaggcagacatttgtgtctttgcatttccagtgcctagcacatggtagacattcagcgaacgtctgcagggtggatcatgcacccaatgttgtcaactcatttgatgatcagccccctttcccccaaccaaaaaaaaaaaaaagatgtaaaatgaaacagcacagatcttactagtggggagaaaggtgaatgcctctaacgctgttagaaaaaggatacctctggggaaactaagtgactaacaaataaaaatgattctctaaaaataggagagctgtccctgcaagctgaactaacagaagatgaagaatgaggtctccctgaaatgcccaccataagactgccagatatgggactgctggatgacactctggctaccccactgagttttatgaaaacataacagaataaagacacttacttgtcaactcaggtaaagaatacacacagaaggtgtcttagtccattctgggtgctataacaaaataacagactgggcaatttataagtaacagaaacttattttttacagtttgaaggctgggatgatcaaggtgccagaaaattgagaatctagtgagggcttgctctctgcttcaaagatgacaccttctggctgtatcctgtggcagaaggggacaaagaagctccctcgggccactttcgtaagggcactgatcccattcacaagggcagagccctcatgatctaatcacctcccagatgccccacttctgaatgccatcagagatgaggtttcaacgtaagaattttgggaggacacattcagaccatagcaggagcaatgggctgatcctgatcccacttaaatagctcataacttctgtagatagctcagattcctcaggactggaggaaacagttcccaacctaaataagggctcctggaaatatgtgttaattaatgaaatacataccaacaactgtgaagagatgttggtgtgatctgttgactcacctgaaatggtttaaagatttcttcccaataggatgtgaagagccatctcttcctggggattatgttctggttgatgtagggattaggtctccacttgaggacgaagtggggaagggcacacttaagcgaacagctctcttggttggcctatattgactgggcagattttatatcagaattccaaatctctgcctagtgtggttatagttgagagagcacagattagaaggcgtcaactacaggctcaagtttcatcacccattcaacgaatcattgaagggagccaatgattttgtttgaattccagtctctctagatacaaaatggagtcaattctttctgtacccaccttattagttgctagacaaaactttggcaatcatttgctctaattcccttatctaccccacaaagaaactcatcagttaaagccttgttcttacctttcttggtcacagaaccctctgaggatttgttgaaagctatggatccttctccacagaaacatgcatttgtgtgtgtgtgctcccacaaaggcattttggcatattatttttgaaagaatcacaaaactcttgtggttcgttcttagggaagccaagttaaaaaacaacaaccacctctgaaccaaaggaatttttaaaaacatacacagggtaaaagaagcttgttcatgtcatcatgaatttattttcaggcaatatgacaatctattaacactcagcatactctgaacttacagaataagtaccacgccatacttcctcattaatgactatcattttacatgagcttcttccacaatcacaatgagagaacagattgctacatgtttgctggtaaatacattcagtaaggcactcaaatcctagacacgaactaaccacagaacgctcttccctgctttaataaattgaaacatgatctcatttccttcactttcaatactttttatagaaagacacgcttgtcttgaacttgtctaaacataggtttatataaactaatccattatcattatagttataatcaaggaaatgatttcacattgacggttttttaggtagggataagcgaaagcactgcagcagtttctgaaggagtgtcttctctgtggttccccatacttagtacgatgcctggaatgtagcagggactaaatacagtgaacaaatgggcaaacctttaattcccagggatctgctacatattgccttgactggtagatcatttctccagaagaaaggaagaaaccaaaagacaaaaacaatctttttaaacctcacaggattttcttagaaaaaagttttaatttatatatctagtgcaattctctttgtaaaatatatttcataaaaaatccaaagcaaaagccctgtcattcatttatttcaaaagacaaatcatttcagtacttcttccttgaaatgcctgcaatttcttcctctggcctcagagacgggcattggctccatgctttaccatgtcaggataaaaatccaggagggagaaatcttgttgtaatggatagctgttttcatctaacacaaaaaggctctgaatcttcaatacacaaggttctgcgctgactgccaacaaggagtggaacaggtctgccacaaccatcccataggtgatctctgaggaaggaactgcagaagacgaaaacacagagctctcaagatcgctgctagcttgacaggagcacacacattgaatggtttcattgtttcttttggttcctcaagtctcaaacccattttaaatttctcctcccggccagtagcggtggctcacacctgtaatcccagcactctgggagacggaggtggctggattacttgaggtcaggagttcgagacatgcctggccaacacagtaaaaccctgtctctactaaaaatacaaaaattagccgggagtggtggcacatgcctgtaatcccagctactcgggaagctgaggcaggagatttgcttgaacccaggaggtagaggttgcaatgagctgagattgtgccactgcactccagcctgggcaacagagcaagactctgcctctaaataaataaacaggtaagtaaactactctttctataccttctctttctagttacaagctattgaggcactccagagtgacagcatgtgatccccctgacacaagaaacaggcccagataacacaccgttcagaccaacagcagttctggttatgctgcagtacatcagacgagtgctcttatccatccacagttcttatcacagttacttatgcatatattcattttttatataaaagaatcttgaatcggtcacttaaatattgaatctcaataataaaaaatactaaaagtatagctaaatgtgttattttattttgcatttgtcctacactcttcccctcacttttttaggacatgtaatcaagacatttgggaggttgttcaataccagaatgacagagcaccatcgaccatgctcagactgtactaaccccttgacaattatcacagtctttcttggatggggactacagagtcctggaggaccaatgacatattttggggggtatgataattctctacaataacttttaaattttgtattttcactgcaataaactaaaacataaccaatattagtaatagtctgcatggtctgatgaccactttatgaccaatgacattttgacttatgatcacaatctaattaatgccaagaagtacaactttaattgtctcaagaatggacaaaacactgaagtatatgtgatatgagaattatgcttctctaagagataaagactaatttacattatgcaaaaaagaagagataggccggacacggcagctcacgcctgtaatcccagcactttgggagaccgaggcaggcagatcacctgaggttgggagttcaagaccagcctgactaacatagagaaaccccatatctactaaaaatacaaaattagccgggcatggtggcacatgcctgtaatcccagctacttgggaaactgaggcaggagacttgcttgaatccaggaggcagaggttatggtgaactgagatcgcgccacagcactccagtctaggcaacaagagcaaaactccatctcaaaaaaaaaaagaagagataacactgaaaatatataagtaacattaagaaaaggaatgaaaatagccaaaagaataaaaatgaaataaagaaaatgggggaaaaaacggagagaggcttctaattaagatgtagaaagctggaaaaagtggctcctaccctaacagttactggaaaaaactgaataaatataaaatcatcattttcttgaatacacatgagaaccaaggttgtaaaacagccaaaaagactgaaacataaggagacaggtgcctccagggagatggaacaggagcacaggttcccttggggcaggccttgggaagaagacaggtcctccatacaggcaggaaagaagaatgtgattaatttttattaataaattaattgcaaaaagccaatgaactgccagtgtcagcaacataaggaacatctgcatcctcataggctcttccacatagtacgtctcacctccaccaggtgctcataagactgggggcagggcaagacatcagagaaagcttccaactacaaaacacaaagcaccatctggcctcccctttaaggaacaaaagccttcaattgctggaggagggacaccaaatcctgttgccccagggtacaggtgaggaaccagtacagatgggggaaagaaaaaagaaaaaaaaaaacctccatcctgggggaggactgaaaaaccaccctgggtcaagaccattagtggtcccctactgctggggcagggccaggaccacacaagacccactaaaggcacaagacagagctcagctgccatgccacataagggacagggctaccaagaaagcgccatgtgcaacatccgtataagactggggctggaccagaatcaaagaggaacaaccctgctcccacccaccaggttaggatgcaccaaataacaaccaacaaaagcttgtgcaacttggggaggtgcaagaatatggaaagaaactttctctgaggcccaggtgcagagtggagggctatgctgatggtggagcaggaatactggggaaccacttcccaccataagcacaagataatttgaaaccagtggtgacctgaaggtaaccagagaaacaacaaaacctgaatccaactcaacttatgacaaggctgaccatcctgctcacccctcacctccagtaaaggaccagaagaggcatgcctgtttccaggtacaactactatttacctcagtttgtactgttctacttaatatatgcaacgttcagcattcaactcaaaattactagacacccccaactaaaaaaaaacacaaaaaacaatctactattgaaagataaagcaatcacagaaccagattagctcatcagcttagaggatctgaggctaatgagaacaggaatggagtttgaatacctgacaaatatattatctttgctttattcttagccactgacaactaagacatcatggttgaagatcttgcaaatccattccactgacactggactatcttcatatatattatgtcatacactcattgacttcattcttataaaactagagttaagtaaaatagtttttgcttaccaacaggaaatgtaggttaagaagaaattaggtgcctcccgctgttcatgtactaacaggtgtaaagcaagtcaaccttctaacttacataggcttatatttcacttaagctaaattatccttctgttttcatatggacagaaaagctcttaatttaaagtacagtgctctttctgttctgatataccatttatactcctgaataaaacaacttcttgatggcacactgatatattacctatcactctgttgaggcagtctgcagaaatgttgagaagaatcttctctatcagctttgattctacatggatgtaaacattatgtcttccatcaacggcagtcattaacgctggcctacagaagagtaaacaacacacgaccttcaaaaagattttcaaataaaagaaatgcttaaatgaaaaataattccaaaaagcacttggtttttatgcaggattaattttaatgcttaaaacaactctaggatgttctgtgacatcctagaaggaaaaaaaggtttttttttccccaagagcttcaaatgataaattactacattttatttattctatatccatttttaaatttcagatactaatataaaaatatattaaactgttttataaattatttttagaaatgaaaataaaaataataatcacatatttcacaatcacaatttcaagttacttttttcaactgaattctttcctatcagaaataaactgttttgcatatcaataaaactggattaacaattttcagtgcatcctacatcttaatgctatgtagctgataaaaagaatgaagaacatttgcaagtgctattagggaaggagcaccaggatagactctagggaacaacaatatgaacaatattcttctgtccacatgcttctaaagaaagggatacacatgtgctgggatgaacataataaatcactggaaggacatacaaaaaaccttctcaccagcatggaagcagcactggtgggagagggttggatggtgaaggagactttcactctttgttttataacctcctatgtagtgtgcattttaaccatggcatgtggtacctattttataactacattgatttttaaaaaataaattgagaacagaattcagaaacaggctcattagcgggggaatttaatgtaacagagctaaaacataactactgattttccccctaaaaacccacttccccctttattcacacgatgactctatgttccttcctcttttcactctacactctttcctcagcctctctctccctccattatttatttcaacaaatacaaactgagtatctatcatggactgtggtaagtgctgggtacccactagtgaaaaagacaaatctggttccgtcactcaaggaacgtaaaactgtagagggataggaagaaattgggcatgcgcggtggctcatgcctgtaatcccagcgctttgggatgccaaggtgaggaggactgcttgaggccaggagtttgagaccagcctgggcaacacaacgagacctcatctctacaaaaagaagaagaaagaaaataagcttttcaacagtggtgccaagatgactaaacagggatggaacagtcttttcaaaaattcatgctgggacaactagatatccacatgccaaaaaataaaattataccccttccttatcccatatacaaaacttaactcaaagtagataataaacctaaatgtaggaggtaaaactactaaactcttagaagaaaatacgggagcaaatctccataaccttggcttagaaatgacacctttcttagatatgacccgaaagcacatgcaacaaaaagaaaaacggaataagaagtactggcaagaatatggggaaattacaaccctcatattgctgatgagaatgtaaaattgtgcagcaattttggaaaacagcctggtagttcctcaaaaggttaaacagacagttaccatatgacccagcaattccaccactcctagatatatacccaagagaaatgaacacacatatccacacaaaaacttgtacacaaatgttcacagcagcatcattcataatagccaaagagtagaaacaacccaattgtccatcaactgatgaatggataaataaaatgtggtatgtgcatacaataaaatattattttgcaataaaaaggaatgaagtagtgatacatgctacaacatggatggaccttgaaaacatcatgctaagtgaagccagtcacaaaagatcacatattatataatatttatataaaatatctagaacagacaaatctatagagacagaaagcagattcgtagttgccatgggttgaggggcatggggaatggagagtgactgctaatgagtatgaggctttgtaaagggctgggtaatgaaaatgtcctaactggttgtggtgatagctacacagcccttggaatatactacagccattgaattgtacatttcagaagattaatttgatggtatatgaattttaacttcagtaaaaatgttttttagaaaagacagtatgcaaatacaaattacagtaagcacacccaggctactataacagaaaataaagaagggtggttaggaaaggcctctctgatagagcagcatttaatctaagacatgaagaaaccagccttgtggagtcagacagagggaagacattcgagaacatcctaaggagaaaaatcaaaatgtctgaagaactgaaagaaggccacgtggctagagtgctggacgacaggggagtggcagcagatgagactgcagaggaaacaagcacaaggagatgactgatgggtgaagcaaagggtaatcacactgccaacgggtggagaataaaggggaggaggcaaggccaggaggagccccaccaagagactgctggtgtgctggtttgcgcaataggtagtagggactcagatgaggcctgagtgattccagaccagcaggcactgactttccattttggtttcacagtaattgaggttcagctaggggaaggtaaacagggatgccacatgccccgcagcatgtgggatatggtacataatgagaaactgtcctgagaaaaatgtcaacaatgcccctgctgagatacactggactaagatgttagcagtggagatggaaaaaagtggatgaatttgtgatatagttctgaatgaaaattcctaggacttgctaatagattagataggggaggtagggaagagaaaatgatgcaacgattgtgcccaggtttccagcctaaataattgggtagatggtgtgccattttccagaaagtataaaaacgaagagaactagatttgagtgtggttttaggaaaaacaagagtctattgtgggtatgtttaaatgtgagatggacatcaagcaaagaatttgatacctgactactggagcctggaggagaaaatcagggtgaagatgttaagtacaaatacgaaaacagctgtgatcatccaggcagaatgtacagaaagaataagaggaaggacacagacgagagctcaagattaaccccagcatttaaagagggggtagaaaaggctgagaaagaagggcctgagagacaggttagaaagcaaggaggaggctgtttcaagaaggaggaagtggactgacatgctgaatataactgagagcagttagagcgaggaaagaagtatccatgcctcaggcaacatcaaaagtgtaactttgacaaaagcagcttctgcagcatggtaggagtagaatggaataactgaagtgaaactgaagacataataggggagagagagtatatttacaactctttaacaaagtttggctgggtataaaacagaatagaaaaacgaagggataagagggagatgtaatgttaatggatgattttgtttgttttttaataagagaaatatgggactgtctttataggctagtaagaataatccattatgagaggtaatcactgaagattaagaaggaaaaacaaaacagggtgcagaaaccaaggaaaagttcaatcaccacagataaccttataagcctagcccagacttctcttgcaaattgcatttctttacatctaaccactttccaacttgttacctctcaggaactcaagctcaatatgatcaagatttctcccaaggttacttgttttaataaataatcttattgttcacccaactgtcaatgatttgcaatgtacctgtgctctctctttacctaccaatcactacatcttgcaaactattttccgaccattctcaaatctgtccacttctttttattcctaccgcttcctctctagtcaagccaccatcatctcccctccaaaataaggcaacagcctcttaccgcttctctgcactagcttcattctaatccactctccaacgcacagctaaactcacttctgatgaacagaatttgatagaagtgatgccacatgacttctgagtctaggtcacaaaaaggctggcttccacctggaactctctttcttgcctttcctgctctgaggaaatgagctgccactttgtgagaacattcaggcagcccgtggagacacccaagtgaagaggaactcaacttgtcagccatatgaatgagccactttggaaatgaatcctccagccccagtcaagccttcagatgactgcagccccagcctacaccttgattacaacctcttgagagacccaaacatttcctagtgctgcctaaataggagccttaattgtggtttgacctgctggggttttttgcttccagtacagaaaaataaatgtatttcttgtattccaaaaatgtaaatctgaatattctgtagaaacattgttaaaaatggtatttgagttttatgatagcttgaagagcaggaactatgctatctacatgttaatttaataaatgtctgtggcctcgtatgagactccattgcaatatctaatgttgcttccattggaaaatcagctccaagttacaaccaatgtaaaatatgatcaacccactcatagtttgggactgttgtgccacacaaatgttcattaagtgtttcttaaatggactaccaagcttcttgggcacaataagtctacttagatcaactagtataacatccacagtacacatgtgatatgtgaacatacgtggattcctaataaatatttgactgagtcttagaaaaataatcaatgagagttttctcttattcagtttgctgattgatttatatagatgattttggagtcacatacttgataacttgaagggagtttgttaatttcaatattttctttccaaggaaaccacataatctggactctaataatttaaaggcttttaggctgggcttggtggctcacacctgtaattccagcactttgggaggctgagacgggtggatcacctgaggtcaggagttcgagaccagcctgaccaacatggagaaaccctgtctctataaaaatacaaaattagccaggcgtggtggcacatgcctgtaatcccagctacttgggaggctgagacagaagaatcacttgaacctgggaggcagaggttgcgatgagctgagatcgcaccagtgcactccagcctgggcaacaagagcgaaactctgtctcaaaaaataaaaaaaaaaggcttttaaataaataaaaaataataattcttgccttaacatgaccattcaacattctagtaagacaacaaactagcactacatctttaatgtggtatagtttaggaagagatcttaaatacctcatactagttatgccataatcaggtgatactgatctgtgaagtccttctcttgaacagtcattttgtaaactaaagattcaaaggccctcctccccataaggaatagtattgagcagtatttttgtccaataaatgcttatattgaatagaaacatttggaatgatataaataagtcacctatacatacttttgaggggccttaactattaataaatcaatgttgtttgttacataccatgcattttttgttttgattttgagacagggtctcactctgttgcacaagctagagtgcagtggtgcaaacatagctcactgtaacaattgatctcctgggctcaaacaatcctcctgcctcagcctcccaagtagctgggactacaggcctatgtcaccatgcccagcttttttttttttttttggtagagatggggtttccctatgtttcccaggctggtcttgaacccctgggctcaagcgatccccccaccacggcctcccaaagtgctgggattacaggcatgagccaccacacccagcctaccatacatcttaattcaatcttcttttccacaaaagcaactttcacagtaatagcaaaattcattcacttatttataacaaacataatatctgtaaagagaaataaggtttacaaattaagcttctataacttttcttgaagtatgccatgataacatgtggaatatatctgaatttagtttttagataccgcaatatttagaaataatcataaggagcataaaacactgagtgctattttgtaaacacatgtaatttataaggtaaagagaaaaatgtctgagcttttgactacctattattcaaaaaacaatgtgtttttcactgagctgattagcagttttaccatacaacatttatttgctggctttaatttctaaggtaaaggtgggaaaacagcttaaatgtcttactagcttccacaacaactcagaggtgacatcatatgatacttttagcctttaaattctaattatatgttaaggtgggaaaatgagttatttatgagcatttagattttggttaaaaagtaaaccaaggaaaatgtttctttggtacagctgtttgaagacaataaaatctcccaattactgctttaagaaattcctatctttaagaaattcctataacgattcctgggtaatttttgctaccataaatagctatctatcactcagggaaaattttattctcttcgactagctctagttaattctttttagaaagtaagagtttacagactagtttttccagatctataataattattttccatcaaattggcttgcttagttgccttacctataatatattttcttcatagtaaatggcaagcagctaaaacattgtttgtagatcctgttctcatctgtttctagttccaatccacattttgcacagccagtatatatgatgttgggaagagaagaaaaaatactcttcagagaactgtgagcatttagagatatcttctgagctgctgtaagaggaaatgccagctctgaaatctgggctttaattagaaccactcctacaaacaacaaacagatatgttataaattattgggccaaaattataactttaatttacaaacatggctaattttatagttgatttacagtcacttgtagtaaaaggatacactgaggtcttgttcttcgtcttctttactattttcctagaatctaagggcagggaggtctggctgcaactgagagcaggtttacttggctaatttggctgaacatgtgatgtttccttccttccccatcctctggaatcaggcaaaataagttcaatacctcctttagaagaaatcccttcgaatacttgaaactagctaacatgccctctctccttgccctgtcttcttttaaactgatcatggtgaaaagccagataggggccgggcacagtggctcacacctgtaatcccagcactttgggaggccgacgcgggcagatcacgaggtcaggagatcgagaccatcctggctaacatggtgaaaccctgtctctactaaaaatacaaaaaattagccgggcgcggtggctggcgcctgtagtcccagctactcgggaggctgaggcaggagaatggcttgaacccaggaggcagagcttatagtgagccaagatcacaccactgcacaccggcctgggcgaaagagcgagactccgtctcaaaaaaaaaaaaaaaaaaagccaaataggaggtgaacttttcttcttctctctacgtaaaaatatcaatagcctgttctcttttaaacttttttccaactttccgctcaccattatcatctatatactctggctgtgggttataaaaagttctcatttattaatcgtttctcaggtgactcacaagaaacctcaagcatattcataattcactgctaatggctcatccattcaccagtaaacaaatactgaaagtctactatctcccagacattattttttcctaatttacttttgtcttactgtgtactggtgaggtctatgagttttcttgagcattattctccctttctccatagtcaatttaaaggcttctttaagccttaagccttcaaatttgttcttcttcatccacttagaagtaagaacactccaggtcaagaactaatcactctagtctcctactgttttctggttatctctttcagagtccagttaatgatgagtcttctgttcttaacttcatttgctttagtctttcaatgcccaaagacggtttcatcatctcttccaattgtgtcacatatccctacatgagttagcaggagtgcgtagcgatcgaatatgtaacaaactgtagaagattcaataccacatctttccaaagacatgttaaatcactacaaaattattattttttgttgttttgagacagtctcactctgtcgtccaggctagagtgcagtggtgcaatcttgactcactgcagtctcaacctccctgggcacaagtgatcctcccacctcagcttcctgagtagctgggactacaggcacacaccaccacacctggctaatttttgtatttttttgtggagatggggatttgccatgttgaccaggctggtctccaactcctgggctcaagtgatccactcttcttggcctcccagaatgctgggattacaggcttgagccaatgtgtctggcctaaaaaaatatgtaaaaaaaaaaatttcgatttttattttagattcagagggtagatgtgcaggtttgttacatgggcatatcatcacccaagtagtctcctgtagtaggcagagtacccaacagttagtttttcaacccttgctctcctccctccactcaaaaagtctttttttttttttttttttttttgagacagagtattgctctgtcacccagtctgcactgcagtggtgcaatctcggctcactgcaacctctgcctcctgcgttcaagcaattttcctgcctcagcctcccaagtagctgggactacaggcacccgacatcatgcctggctaatttttgtatttttagtagaggcagggtttcaccacgttggccaggctggtctcaaactcctgacctcaaatgatccacccacctcggcctcccaaagtgctggaattataggcatgagccaccctgcccagcctaaaaaattcgtaataattcaataattttaaaagaatgttcacataatcctatcattttgtaaatttacacaactcttgaaaagaattaaaaggtcacgctgaatgtggactttgctttcaagggggtcactccgctgagcactgaaattctgctggcggtaagatgaggtactgggtaagcgtcttcatttctttacaaggactcaggcctagcctcatccccctctggcttttgttgagcaagcagacccttctaggaaatgctcccatgctgatctctctttctccttttatttaactataaaataggttagggaaaagttgcttgtgttttcatattctctctccatttttgtcttaaaaacacatacactatgacagaaactatgaattcagccctcatagctgaacataaagagaatgaaaaaggctaaacaggcctctgtgaacaaagcctctgaaggactgattttaatggcacagttttggcatggcttgctaatgaggagcacacctccaggacttccaagaacatgcacaattcctggctgcgtcctcaaacaagtggggctatagcctgagaatctttcatcatcagcgtggtggcctcctattttgttgttgtccatgatgttatttatttttatttttaaacctaattctagacttcaatcccagcagataactgttttgtgtaagcagtaaataacagagttgacttctccatggcaccaaactaaacgtctctgcaaagtaaggtagcccctcaactgtgtctggcattccttcctgtggtgaccacctctatatgtctgtgaagttggagaagcagagcacgggaggggcacataaatataaaactggcttaggaacttacatgatgctataacattaccaagattttaccagttagtataaatctagagtcttttatgaccataggcaacttccatttttgaaaatagtatgaaatttttatagtataaaagcttataaattttctatcatctgtgtttaccttccagaaatattattaatttaaactatctgctggtattagtaaatgtttcagtgtagaactaagaataaggagttcttctctgagaatgaaatctctgtattcaattaaaagttgggttttttgagaggtattgtctttgttttctgcctgtattctccttagcatagttttatgatataacaatgctaacccttcaatcatatattggaaaacatatttacacatatatgtgaattaacccaactagtaacattttaatctggcatttggccaagataaagtaaggatctgaatttctgctcccacttgtcatataataaaaaataggtatttgctctttgtccctggttcctagcacatagttcctaaaactactggaatctagttcagatatttgcaaagatttatatttcacttttatatagacttatacatttttaccacaagtggtagcctttttgcttatattaaaactagcagtgggctgggtgtggtggctcatgcctgtaattccagcactttgggagtccaaggcaagaggatcacttgagtccaggagtttgagaccagactgggcaacatagggagactctgtctctgccaaaataataaataaataaatagctgggtgtggtggcatgcactgatggtatgcactagccttcccttccctcctcagctacgcgaaaggctgagcggggagaatcacttaaacctgagaggtggagactgcagtgagctgtgttcacaccactgtattccagcctgagcaacagagcaagactctgtttcaaaagaaataaaaatagcagaatttatgtatataaaaatcttacctgaacacttatcctctaggtgggttgctaagtctgatatcttcacaaaggagggtgcacttttttgaaattttgctttaaatgtaattgcccttatatcatcatcaaacaagcactcacaggatgaccaaggcgttgtatgcaattctaggttttctagtgtgtaattgcgctgaacaaaaagatatttaaattcccaaatataaccttaaacaaaaacagtaaaaacaaaagtcaccaaaaaggaaaaaaaatctaggcttagtatcagattaaatagattgatctgattaagtcagttgaatactaatcttttatcactaaagaatttgggtaaacagagacaaaatatgaatggtgcattaagacaacagaagcatgctagagattattattattattttttttttccaagacagagtctcgctctgttgcccaggctggagagcagtggtgtgatctcggctcactgaaacctccacctcccaggttcaagtgattctcctgcctcggcctcctgagtagctgggattacaggtgcgtgccaccactcccggctaatttttgtatttttagtagagacagggtttcgccatgttggtcaggctggtcttgaactcctgacctcatgatccgcccacctcggcctcccacagtgctgggattacaggcataagcctccgcgccgggccaccagagataattttaataaaatattttctaaagattccttgccctcctgaacggtcatcatttataataaccaactgctttctgtaaagaaaattctcatgtatctatctataggcaaagttttgttttgttttgttaaagaaaggacactgaaatgaacccaagtctaatatttcactcatatttcaatactttagttatcttagttaacttttctagaacaaaaagcatttagacacaatagtacttatttttaactctcagtaacaatttttttttttttttgagacggagtctcgctctgttgcccaggctggagcacagtggcgcaatctcggctcactgcaagctccacgtcccgggttcaagccattctcctgcctcagcctccggagtagctgggactacaggcgcctgccaccacgcccggctaattttttttgcatttttagtagagacggggtttcactgtgttagccaggatggtctccatctcctgacctcgtgatccgcccgcctcggcttcccaaagtgctgggattacaggcgggagccaccgcgccggccacaattctaatacttaaagccacagtaacacagaccttgttactgttatattctctattagtaaattcaacttatctgtattatcatattctgtattagtaaattcaacttcaaaactataataaaacaaaagagggtttcttagcactcatttttctgataacatcagctgtctttttagtttctcacttcaggccataaatctaatttactacacctgctcatctccttagtttctttcactaaagatttttttttttttttggtggaaaatcatcaaacatctcagtaaatctgtaaagacagaacatcactagctagaactaaagcatatattccaagttactgcttaaaaccaatcactaaaatagctttcttgtcttattacaaaatacctgattagaaaagtaagctaagagaagccaagtaaataaacatatagcagccataatctcaacaccctaaataagcagttaacattttagcggacaaccagttgtttgggattttatttattgggattgacttaataagtcaaatatagttttatatgtatgtattattctacattgcttttaaatattacataatatgccattgtccagatacaccaaaatcttaaaaattattacagcaaacctctattttgagggactctggttgttttttatttttcacaattatacatgataccatgataaacccattttcagctacatctttatacatagttatgataagttcctagagctaaaattattgggctaaaagtacccccaatttgttcatattaattgtcagttatcctcaagaaaggttctgccagtttgcatttccaatagctgatgacagtagctgttttcccatatcttctcaatcaatttcttaaaagaaaaataatctatcatcattactttgtgtgttttcaattacttgtaagaacaatttttccatatatttattggccatttttatttcttctttggggacttgcctactcatatcctttccccatttaactctatagatatgtgtcttttgcttactgcattattgtctgacaatgtaattttttttctgttttttttttgttgcctttcaattttgtacatggtggtttttatgtataatagtttttgttcctggattttatttaccctaccaacctttgcattacaaataattttgcctatattttcttctactattcattgtttcattatttttgtatttgaatctctaatgtatctgaaatttatattggcacaaatataaagtataaatttaattctattttttctcacattgttagctagattttccaaacattaactattcttttattttaaaaagcataaggttttaattttatttttaattataaaataaaatacatttattgtgaaatatttaaacagtaaagatgagggaggtaacaggtgaaacaagactgaccatgttttaataagctggctaataggtaccgaagttcattatgctggccgggtgcggtggctggctcatgcctataatcccagcactttgggaggctgaggcgggtgaatcacctgagatcaggagttcgagaccagcctggccaacatggtgaaacctcgtctctactaaaaatacaaaaataagctgggcatgatggcacatgcctgtaattccagttacttgggaggctgaggcaggagaataacttgaacccaggaggtggaggttgcagtgagcagagatcatgccactacattccagcctgggtgacaagaatgaaactctgtctcaaacaaacaaaaaaaaaaagtgccttatgcttagtattctctctacttttgtatatgcttgaaggcttttataataaaagtttttaaaagtaaatgcagatgctcacacacatatgaaattcaaactaaaggtataaagaaaaaaattaaagcacatataatactactatacagaaataactacggctagcattttgctatacatgcatatttccaggttttcaaatgcacatatgtacttatagatacatttttattaaaatgagatactatcatatataaagggttttcttgaaaatttttgtgtattaacttatataaacataaaaatatttattatatgataacataatatattttctatacatgaagttttacaatccaattttttttattttttatttttttttaagatgagaacttggactcctgggctcaagcaatccacccacctcagcctcccaaggtactgggttaacaggagtgagccaccacacctggcctataatctactttttaaactaaataatacattacatatatctttctaagctaatgaacatacacatttttggtagtgaatatctttatgtattcacccagatcacaaatgattcccttaactgttttcccatccactgaaataagctcaagctctcatatttgtattgcgtgaccctgtcttcctgatcacagttttttgaatcaaatttactctgggcaatcagattctctttgctgggaatttggaaatggggttggtctcttgaaaagaaaagtaaaatcaggaaaatagaattacttaagtaatccttcaaaattggtatttttatcttaaaaagactgatgtgaggtattgaagtagatgttaaaactttaaaatgatggttacaaataaggggggctggatgaatgaatgtacaaagaacaacaacatcttaattcctggattcatacgttttcaatactaacctaaacaccatagagtcacctagagacaactgtaatttctcttctattaaccaaaaaactattaattttaaaagaatattcacattaaacatggagcaatctgctctgttacagctccactatacctgtgacctacattcttgtgtagcatgcactagactcatgttctcagccaggctatggtggtcaatgatcatagttagtctatcactgatacatgtttgtcagcttgctcaaccaaacatctgtccctgtttgatcttaacataaaagtccaaagttagacttatctcaaatcctagtcatagctattaatgattaagagagacaatgtgatagatcctatctacaaataactatttggaaggcagaagtttggagagacattaactctttcaggtaaaaaataataatatactgaatcaatctctaaattaatttagcagggaaaaataactcataagccacaaatgaaactgtctttgattgttacaactaaaggatctcacaagagcaaagggaagacactatactattttaatgaaacatcaattccatttaattcaatataccagaaataatttatgctttaaagaaaaatgtaatcatgggtcatattttaacactgaacattctagggatggctaacagtgcatgcttttaaaacaactataataaaaatatgaaactgtaatttattgaacattaattgtgacttgaaagagttaaggtaactcccttgacatctgccttataatcatagcatttatttatcagagtactctggctgaaaaaaaaattgtagaagcttctccagaattaaatgtttaaagaacattatttgaaggaggtaagatcttcactaaaaaggtaaagtagtatatctgggaataaatttaagcctttatttcaccaccattaattaatgaagacttattagataaatgaattgctacaagaggtacaaaattttaacagaagaaatttgcagaagaatattcaatcatgatcacttgtatttcaaatgctgtctcgtctcttaagattttctccatcttgggctcataaacattaatcatttaccgaaatataaataggttaaatgctttttggtgtatttaccttttttcctttgaagttgagggtaccaggctgctccaggaccccataatacaagcgcataatgttgatcttgggcctgttccactgttaacataacttttttctgcttctgtcctctataactgtatactgcctctggaaaaggaaaatgagtatcttagttggcattactctatcacacgtgataccatactttaatagctgatgatacatatatagtgataaccaaatggtacactaagatggtcttgtatcttaattttttcataatctaaaattaaggaggcagtcaaaatgtttacctgtcagtataggaaatcaacaactcttagtactgcgtggactaacacatcaggttgaaggtgctccaattctacaaagtctatactgttcaccctctgaggctgtctcggaggaagatctctgaggtaggaatgttttgaggacacatatgccagtaagtcttgaagtacaacgtcactaactacactggaatctaaggaaaaaaaacatgcatacagacaaaagatggcaacattacatttttcttgacaaataatattttttagaactgtattttatgttgtaaagtatgattagatataaaatatagttttgttttctctaaaacatgtacaatagctaagtcttgaatcagtttagatgtaaaaataaacttgatatttttaatcaatggaaatggaattatttactatccccaaaaaacttgtgctgttcccatacttctttactttgttaataatatcattttctatcaattaaccaaacacaaaatttctgttcttttttgactccaccaccctgtaacagccaattggttccccaatccctggagtctgatttgatcctgctttcccaactatcctagcctctgccgttcttcctcaagccccttctgaaacaggctcagagccacctcactggttctctccctgagtgtgccttactctttccacacgaggcctccgtcctcaccaatttccagctgcaaggctgtcttcttgtcctacccaataccacatagaatgatgaccactatagattcacagtgctgcttttttccctgagctcagagagcttttaagcatgtgctacattgtaatatttttcaagtgttggattggttatttaattcttcagttactatgtcttttaaatgtttttctctttcctgtctcatttttttttctcactttttattaaggtatagtttctgtacaataacatgcatatattttaaatgtacaggctgatgagttttgctgattaaattttaatttctctgaaggtaagagaagtatgcttgagtacgtgattgattgctgaccaaaataagatattggcaataaacacttaagtactttttagaaagcagacttcataaactgatttgtgattcttctttccttcctttagacagtaaaagaaaagggatgtaacaggtgaaacaagactgaccatgttttaataagctggctaataggtacttaagttcattatgctttgtattctctacttttgtatatgtttgaaggcttttacaataaaagtttttaaaagtaaatgcagatgctcacacacacataaaattcaaactaaagttacaaagaaaaaattaaaaccacacgtaatactaccagactgaattcttctttcacagtatttccagcaaatctggaatcagaagagttgtattcaaattctggttttgtcaataatgagctctgtgaacttgtacataacttctctgggcttcgtttttcatgaacaagatagagcttttggggaacaaaaacatctctgacatcaaattatatatttgtccctgattcataaaaatttacatggaaacacatggttatttagattccaaaaaaagtctacctcatggaaacactgtgttgatctttgacttatatatttaataatattcaagataaatttatattcctgtcacattatcagaactaggtttgtaaaacatgtaacacctcactataaagatgaaagaacagaagtcttttcttttcaacttttactttagattcgggtgtacatgtgcaggtctgttacctgggaatactgcgtgatactgaactttggggtacaagtgatcctgtcacccaggtactgagcacagtacccaacaggtagtttttcaaccctctccctctagtagtccccagtgtgtattgttgtcacctctatgtccatgagtagccagtgtttagctcccacttataagtgagaatacacgttatttggtttcctgttcctccctcaattcacttaggataattgcttccaactgcatctgtgttgctgcaatttatttatttatttatttatttttttgagacaaggtgtcactctgttgcccaggctggaatgcagtggcacaatctcagctcactgtaaactccacctcctgggctcaggtgatcctcccacttcagcctcccaaatagctggggccacaggtgtgcaccaccacacctagctaatttttttgtattttttgtagagacagggttttgccaccttgcccaggctggtctcaaactcctggactcaagcaatctgcctgcctcagcctgtcaaagtgtgggaattacaggcatgagccaccgcaccatcctgatttcattcctttttatggctgtgtagaattccatggtgtatatgtaccacattttctttattcaatcctccactgatggccacctaggttgattgcatgactttgctactgtgaatagtgctacaatgaatattcaagtgcttatgtctttttggtagaacaatttgttttcttttggatatatacctagtaatgggattgctgggtcaaatcatagttcagttttaacttctttgagaaaaccccaaactgttttcaacagcggctgaactaatttacattcccaccaacagtgtacgagcatttccttttctacacagcctaccaacatctgtcgttttttgactttttaataatagttgttctggggctgggagtggtggctcacacatgtaattccagcactttgggaggctaagacaagaggatcgcttgagctcaggaattcaaggccagcttgggcaacatgacaaaacctggtctctacaaaaaatacaaaaattagctgggcatgggggcatgcacctgtagtcccagctattcaggaggctgaggtagaagaatctcttgagcctgggagattgaggctgcagtgagctatgatcaggccactgcactccagcctgggtaacagagtgagatcctgtctctaaaaaataaattttaaaaaagtattattaggtcccacttttcaatttttggttttgttgcaattgctcgagggcttcatcataattatttcccagaagtcctttccaaaaacacaatatattgatcagaaataagaatcctctcatgagttgtaaccacttgcaaaatcaaaaccaaattggtaaaatgagtaaccaaattggtttactcttttttttgtttttttttgtttttttgaggtttgcagctattttatttacaagtatacatttaacacaatgaaataaacactgatatattgaagcctagttaatagtagtgtaacaatatgcatcattttgatgattacattattttaaacaacaaactacactgaaaaattaatgccgataaaattcttggtcataatattaagaaacacaatatataaattgaaaatatgattgcttaaaatttgaaaatggaagtgaactcatttggacagactcagagttaacataatctgaagggaggggagctctgacccaaatgatatctttcaggttaacagaagaaaaaagaagcatagtttatcttcaaggagaacgggcagtttgcttcttcagctagaatatattcccagtgtcctcgggctttgcagcagaatcacatcaccgagcatgaagacttgccttgtgaagctgcccccgtccattttttctgcctccaaaatcatccttcgaaaaacatcaacagcagtctgattttctttagcagaagattccaaaaaagctgcattccaagattctgccaaagctttcccttcttcataactgatcaccctttccatatgcaggtctttcttatttccaaccaacataataggtatttgtactttccccaccatatccaacaatttgccatggataactttaatcacttcaaaacttttgattgatgtaacagaatacacaagaatatagccattaatatctatggagtatgtctgaggaaagatagaatattcatcttgcccggctgtgtctacaagttaaagatgatattcttgtccatttactgtgatcaactttgtaaaagtgttttctatggttggatcgtaggagtccacaaattggccttcaacaaattgaatcgtcaatgaggatttccccacagaccggtagcccaggatcgcgatcttccgggactttgactgcggcatcttggcggcctcctcagccccggcccaaccacatcaaccgcggcggcggcggctcctgctgctgtgatcggcggcggccgcgccgggagagagcggcatacagagcaggggcggcggcgggcgcggctgcctctcgctcgctagctcgcgcgctcccaaccgcccggaaccgaccgcgcggcggcgcccctccccccccacaacacgcccacgtgaccggccggcgtcagcaccgcccctcttcgcgccgtggcccgccgcctccgccccccgaaatacgcggggggtgcgtcggggcgacgttttactttaaaggcaaaaaaaggggacgccgcgatgcccccagaaaagtcacgactgaaactcgctgcgtcatgacccggtttactctttcagaaggaaaacaactgcaatattctcaaaatgtccactggtagccatttccctacatcaataaaaaactttagaatatactttatttagctactaacttgtaaaaaataaagcaccataaattcctgtgtatgtgtaaaaacaaagattgtgaagtaacttctaaagattatctaattagttcaagatttttcacatcattctacaaaaacctgaaactctctaggggattcatagaatattctccatccagaattttgtcataagagttttatgaaattactgaactattacttgaatctagatcatccttaaaaccagagatatctacatttcccaaatctcttgcaaagcatttgcataccatgttattttcattatttcaaaacattccttccccttctattctatcaacatctacaagatatgctgaattttacttagaagccatttagctatcattcatacacacacactttccaaaatgtaacaccttcaaatatacataataaaagactaaacttgtatcttttacagaaatctcaaaattaaaatttaactgacttcaactgggcaaaaccacaccatctcagttactataggttcatactaagtcttgatagctgatagggtaaattattcttccctgcttttcttcttaaaatgccctgctgttttcaaccacttactcttctacataaatatcatataatcttatcaaattacatgaaaatcttattggtctttaactctttgcctcaagagatcctcctaccttggcctcccaaagtgctggcattacaggcatgagccactgcgcccttgaaatcttacgaggatttttatggaacatgcactgaatttacaaatcaacttgaaaagaactgaaatcttcacaatgttaaatcttccaattaatgaataaagtatgtttatttcattctttgttagtttttcttcatttaaaaatttttccttttttaggtcttgcacatactttgttacatttattactattagtacaaaataatattgttgtcaatgacagcttcctttgttattgttagtcgctctactctagaaatgtgattgacttttgtatgttaatcttatatccagctactttgctaaattttcacattatttctgataatttgtttgtagttttcagagggaaaaggtatgtaaaccatctataataatggcagttttatttctacctttccaatctttacatatctatttttccatgtttattgcactggttaataactctaatatggtgttgaagaaaagtagtaatagtagtatcctagtcatattcctgaattttaaaaggaatgcttctaatatttttccaattaggatgataattgttctgggttttctaaagacactctttatgaagttaaggaaaattttattctattcctaatgaacaggtgttgaattttatcaaaagctttctttgtacctattgagatgatcgtatacagctcttttaaaaactctgttttgaactaatgtaagacttacaaaaaagttgcaaaaatagtacagagttcccttatattcctcactatgtcgactaatgtgggcatctcacatattataaattatcttaaacaggaaactaacgttaattaaatattgttaattaaaatgtatatgttatttaaattttaccaattctcctattaatatgctttttctatgtaggatttcatccaagatcccacctcacatttagttgttatttctctttggtctcctctagtctataagagtttctcagtcttttctttttcattaccttgacacttatgaagaatcctgatcatttatttagtagaacgtccttccctttgggtttctccagtgttttatgattggaatgaagttatgcatttttggcaattccacaaaaaatatggtggatccttctcaatggataatatcaaagaatttatgataccatacatcttattactggtgatatttaccccaatcactcagttaacttggtgtctgaagagttttcttataaatttattattttccctctagtaagctggtatcctggggagatactttgagactatgcaatgctctctctcctcagactttcacctactaattttagcatctatcagtgcatttgtgtcggtgcagtatttattattgtgatctctgcctgatggtaattctctatttttgtgttttgtatttttttttttttcttgagacagagtctcactctgttgcccaggctgaagtgcagtggcatgatcacggctcactgcagcctcaacctcctgggatcaatcaatcctcccacctcagcctcccgaatagctgggaccataggggcacacctccaaacctggttaatttttctattttttgtagagacagggttttgccatgttgcccaggctggtctcgaactcctgggctcaagccacccacctgcctcagcctcccaaagtgctgggattataggcatgaaccactgagcatggccagtaattctctatttttttttcttttctctcagatttattaattggaattccattggaaggaagagctctctcttcccctctggttagttaatgaaataaatatgtctttatatcagtaaggatttgtaaagattttaatctatgggttctaatccaatactatcattattttcttactcaaattgcttcagctttagccagtaggtgttccttcaggttggctcttgcattatttcaacatgtcttgtctggcaccactagacttccaggcttatcctgaatttgccctgacccagtcctgtaatcaaccacttttagcagagctggttcctttcattagagaactatgttggccaggcacaatggctcacacctgtaatcccagcattttgggaggccaagatgggtggactgctgaagcccaggagtccgagaccagccagagcaacatggtgaaatccagtctctacaagaaatacaaaaattagccaggcgtggtagtgcacacctatggtgccggctacttggaaggctgaagtgggaggctggcttgagcccaggaggcggaagttggagtaagccgagatcgcaccactgtactctagcctgggcaacagagccagaccctgtctcaaaaaaagagaggccgggcacggtggctcacacgtgcaatctcagcactttgggaggccaaagtgggcagatcatttgaggtcaggagttcaagaccagcctggccaacatggtgaaaccccatctctactaaaaatacaaaaattatctgggcgtggtggcacgtacctgtagtcccagctacttgggaggctgaagcaggagaattgctagaacccaggaggcagaggttgcagtgagccaagatcacgccactgcactccagactgggtgacagaacaagagtccatctcaaaaaaaaaaaaaaagaaaagaaaagaaaatgtttacagacgaagatctgggcaccaggtatgctcattattactggggagtaactgcatctgtgctgtgctcgctcaatggacagaactaggagatgtttatgtatgtgtactatcccacccatatacacatgcctatatttctgtatccatttatctatattaaaaatcctcagtttataacaatacctctggttcgttttaaccttcccttgtttataatttctttctccaacagtgagaaatccagctttccttatctacaatctatgtactcatttgttcattctagtatgtacataaggttattgctaagccattcccctttgagaaacatatttctaactagattgcagcatttatgtacagtcctttctgtcattagccttatagaatccagtcaatatactcttttccacagctacttaggtttgttcttttcttccccacccccttctgtgtagttattttattcatttgtaacaatattgggttcatttgtaacaataatacattcatttgttagtgtcacttcctcctgacccctgctatcctgttcccattccccactttcttccacccctctcctacgtgccccctgtaggtgaccaatctctttagtttctggtttatccttcctgcattttctttccacaaataaacagaggtattttcttattcctccaatccttcttacaggaaggacagcatactacatacagttttggggggtttatgttttcacataacagtatgtcctgggaatcactccatatcagttcgtagagatctttttcattctttttgtacagctgcatagtacatagtgttccactatgtgaatgtaccataacttagtgaatcattctcctatatattttgcaattataaacaatactgcaatgaataaccttgtgatatgtattttcatattgttggagatgtagcttcagggtagattcctagaagtgggattgctaggttgaaagctaagtacatatgtaattttgttagatattgccaaatatcccttcaaaagggttgtagcaatttgcattcctaccaccaatgtataagagggcacattacctcacagttgcgccaacagaatgtgctttttttttttttaattttgccaatctgataggtgagaaatggtatctccatgtagttttaatttgaatttctctaataagttatatttgatagccatttttatatctttttttgaaaattgactgttcatctctttttcacattttcccttttgccaggctagagtgcagtggcatgaatacagctcactgcagcctcgacctcctgggctcaaacaatcctcctgcctcagcctcctatgtagctgggaccataggcatgcaccaccacacctggctaattttttgactttttgtagagacagggtctcactatgttgcccaggctggactcaaactcctgagctcaagtgattctcccacctcagctttccaaaatgctatgattaccagtgtgaacaaccacacccagactttgtcactcaaggtttaaaagttctttatatattagggatattagccttttgttgtatgttacaaatattttctccaagtttgtcagttgtcttttgactttgtttatagtgttttggttatgcaaaatttatttttctacagtaaaatgtatcagtttatcttctactgcccctggattctgagtaatattaagaaaaagcctttccctacaccaagattacagaggattcattcaggtttccttcttgttgttgcatgattttattttttacatttagactattaatccatatggtgtttattactgtttgttgtgagatacgtgtccaattttcccttttttccaaatggctacccagttgtctcagcaccatttattaagaagttagcttttatctcactgattccagatactatctttgtcatatattaaattgctatatgtaggtgggtctaattctaatcttcttactctattccactggtctacttgtctattcatgcatcagtacttcactgttttaattacagaggctttatagtatgttttaacatctggtaaagctagttcccctcctctgtagttttcctttgtcagtcttttcctagctattcttgcatgtctgttttcccatatgagctttagtatcaacttttatatgccacaacacatatattttcattggaactacattgaatttacatattaacttaggaagaactgacatcattataatgttgagtcatcctatccaagaacaggaaatgtctttccatttattcatgtcttcatttctttctggagtgtttaaattttttcctcatataggctttgcatatttcttgttaactgtattttgaactatcttctttattactatagtaaatgagtttttcactatcattatgccctctgtttgttatttgtgtatattgtctaattactattattattatttttttttgagacagggccttgctctgttgcccaggctggagtacagtggtgcaatcacagctcactgcaacctcatcccccagcctgggctcaagcaatccttttacctcagcctcccaaacagctgggaccacaggtgtgtgccaccacacccagcatttttttctttttctttttcttttcctttttcttttttgtagcccaggctggtcttgaattcctgggctcaagctgtccacccactttcatctcccaaagggctagaattacagacgcaaaccactgcactcagcctaatgatattttttaacattaattttgcatcctgttatatcattgaattatcttattatttaaatttgttttaactttgattccctggagttttcaggtatgttatcagagcatttgtaaatagagataattttcattcttctttatccattcaaatgttcaaatgcctcttctttctttttttttttttttttttttttggagacagaatctcgctctgtccctcaggctgcagtgcagtgtacaggtgctcactgcaacctccacctcctaggttcaggcaattctcatgcctcagcctcctgagtagctgggaccacaggcatgcaccaccacacctggctaatttttcatctttttagtacagacagggttttgctatgttggccaggctggtcccaaactcctggcctcaagagatccgcccaccttggcctctcaaagtgctgggattacaggcgtgagccaccgcaccagaccagatgcctcttcttgtctaagtgcgttagctgataattctagtataagatgaatagttgcagagatagtggacatccttatctttttcctggttttaatgacaatgcctcgagtgcttttctattaaataagacattggcattaggactaagtatctattttattgatatagtattaatcatattataatgctgtattgatgctatatttatttatttaagaaaaaaattttttttgagacaaggtctgactctggtcacccaggcagaagtgctgtggtacaatcatggctcactgcagcctcaactttctttcccacttaagcctccccagtagctgtaactacaggtgtgcaccactacacctggctaatttttccatatttttagtagagatgaggtttcaccatatcatccaggctggtgtcgagctcctgggcccaagtaatcctcctgcctcagccacccagagtgctgggattacaggcataagccactgtgccaggctgatactatatttattgatactgaaagggaaagtatcctagtatattactagttaacagtattatacaaatgttgatttcctgttgttgatattgtactaaagttatataagatatcaccattgggagaagctagaagaagagttcatgggactttatgtattatttttgcaatcccctgtgattctataattatacagataatatttattttaaaaacttttaaatttgaaatattatctgtatgctaataactctaaaatttgcctcttaattttaaacctgtcttctgagtcctgaactttgtttccagttcttatatgacatctccacttgaatatctcaaagatatctaaaacttaacatgccttgaaacatagcccttttccccacaaaccagttccctctcagtctttcacaataaaggctacctagttacttaaaccagtaatccagtagcagtagattgtccctcttccctgatccccagacccacatcatcagaaaatcctattaactctatttacaaatatatctcggctctttagctccactggcctcccattatctctcaactgcagctattgtaacaacttcctaaccctgattctactccatgatcaatccttctcaactagaaccatggcattctgtatcttaaccctttgttagtttccttcatagcactcattatcacctgcaaatattttacttatatgtctgtttcattcattttttttggtctgtcttccacatgagaacataagctccaggaggacaggcaccattgtacccccagtgtacagtaaacacagtgcctgaaacaatgtcaacacataataaatatatattggatagatgaagaactctatttgagttgtctatgaaatatgtcagagttggttttctgctgatgggccaccctagtatataatgaaaccttgcccatcccaaacacagttcttgttattctaattgttgctcttcccttctacttgctctgcctttctttaagaattcaaagattggaattccatgctctatcttccatatacatcctataactttcctattattccagttatcttcttgtataatcagtatatttctctagctattttcttgtatgatacttcagcattttatcaaatatattttgctagcttattatttctccctctaatattactatgttactactacattatgtgcaggttcaacatcttatattcattttctcacttaatcttcataacaaccctataaggtatatatgtatttttatctccatttcacagaaaaggagataaaggtatagtgaagtgaaataacttgcctaaagacaaagactggaagtaagagggccaggattcaaatcctggtctatctgagtccagtgaccaaaaccacaagtttatactgtttcccttactttgttttctttcttttttttatgtcattttatttcctagtggaggagatagctgctagtttcctcattaaacagcttcttttaaagaagagaaaactggacattaaagaagaaagatagcttttcttagcagtggtagacaggagaataaggattcaaaccacagctgtctgaatacgagaccaatacatttttattacctcaaggattcttaatcagaggctcagaagttccacagaagaacttcagaggtccacggaatgctttagaattataagcaaaattttgtgcctatctacataagtccagttttctggagaaatggtctatagattctcaaagaggtctctgactccctaaaaggtgaagaaccaccactatactgacagcctaagaaaacgaaacatgatacccaatacttcttaaaataaatgtgatttacaatgtacaagttcatttcttaaaattctattttcattcttactaatgaaaagaaaccaatactctccaactgtttagaaaacattttgtaaaagaaccattttaactctaatctttcctagtatgtttttatactttaaacactaatacattacttcatttaaaatgtgccttacattcttcaggctgaatagatgaataactcccaagatttaataactgactgctaaatgttgattgtagtactgtctcaccaatccattggtcctcatgaataacaacatctagagagagaaaaaaacattctgatcatgccataaattccttcacaatgtggttaacctactagtcacagcaaaatattatgcatgcctcccatataccaagcaactagagatcaaataggttaaataacctgcctaagggcacgaaatgacaaaacagcaaatctaaaatctaaatctaggtaaattaacaaaattgcttctttatattcaaatgatagcagtatggaagtccactgctctatataaaaaaggtttaatagcttttatttacataaggaaaatgttatcatgtatatttctgatacatcaaaaataattttttttaggaccagaaggcaaagtagtggttccaaagccgtagtgcctaggagagtaataatattcagtatgcactggtcccttctactataaatatatctgaatataaggcattcttaacatacttgattatttttccctaaatagcacgataattatcttccacacaagttaaaagtgaaagactttggaggtagggaacattttccaactggaaagagagagctgtatatctaaggcggatagagtagaatcaggtagaactaaacataccaacaggtagaaacaattgtaggtagagcaaaacgtgtgagctgtaaagagaaagaggggaagggagctatctctaaggcaggatctaatcagcatacagtgtcagaggtataaacgtatattaacaatagtgaaataatttagagataataggaaagaaaaccaaggatgtataaattccaagtgattacttacagatttagattccagaccctttcctcagcttttgaaccttttatctacaactgcctaatggaaattcccacctggatattccattggctccccaaactcagcaatgtccaaatctgcttttcctttcatagcgcccaactcatttgttgatgctatgctgctaatcaagtaaactaaaatctgaagtcatcttgcctctcccttcccactccttgccaccagctcccacctacccctctgctgcttaaatgtgcccatgccccaccactactactgttttacattacacattcctttccctcccaacaggtgcttgtcccgcctgcaacccatttcttacaatgctaatgagtcattaatcagagcattaatgagttcaggcgagtgatatatcagagcattaatgagttcaggtgacttactaaaaaacagtggttccccactgcctagccaggaagagctagtacagcattcaagacttttcatgatccaacattcaggatgcatgttcttcagaaaaaaggaacagacaagaaatttcaaggagagcattctgaaagctaggactgtgaagcctatgttggattagtgacatagtaatcactagtggtgcatggaggggatgggtagcccgccctggcctcctggctccttcctaccctctcactgacatgccccagctcctagtccttattctgtttgtcctttaaacactgtggtttcccaatgttaagcctcccatcttcttctaattctagtcagtagtctcccttaggtaatccttatttttggcatctcttcattctattgctagaagttataatagcaaactgtctactgtgttggtattcaacaaggtctggaatacatctgttacttcaaatttttcagtatgggccgggcgcggtggctcgcgcctgtaatcccagaactttgggaggccaaggtgggcagatcacaaggtcaggagttcgagaccagcccggccaatatggtgaaaccctgcctctactaaaaatacaaaaattagtcaggcgtggtggcgggctcctgtagtcccagctacttgggaggccgaggcaggagaatcacttgaacccaggaggcagaggttgcagtgagcagagatcacgccactgcactccagcctgggcaacagagcaagactccatctcaaaaaaaaaaaaaaaaaaaaaggaagatttctgtttgggggtatatatcaataggtagtatgaactacccaagctatccaactaagttcactgactcattaggacaacagaaaagtgtagatttcttttttttcccaacatttccatctgttccacacaaaagaaacttattcagaattcggtgaactagatcctctttttcttaaaaagacaaaaaaaatctgattttttaaaaaaagttcatagaaatcatctaaatgtcttataataggaaaatggttaagtaaattgcattacagccaccagagagaatgttacctagtcgttaacaactatagagatgttaggaaaaaatacagagattgcagagttgagtttacacctacctaggaaaacggaaaaggcccctgagaggtccctgctgacattaattgcctcggtaaaatgaccatggtccaggatccagccctcttttacagtctgggaaacttaattttgttaacactccaaaactagatttcagctctgcaacataagctcatactaaatcaattaatgaaacaaattaaagaaaaaaaacatttttttttcatttacaataattgcccaaaaaaaaacagtatttcagcctgttctcatgctgtgggcagctctacaactagaaagccaaatcacaagcaaagaggtattcagcaagcactgaatcagaacagagggagttaggtgaattgaacctccaataatataatcacatataaataatattagctaatattgccagtgggatgtggctatgctaagcctgttcattacaattttgtgtttacctctttataaaagattgtactcggccgggcgcggtggctcacgcctgtaatcccagcactttgggaggccgaggcgggcggatcacgaggtgaggatatcgagaccatcctggctaacacagtgaaaccctgtctctactaaaaatacaaaaaaattagccgcgcgcggtggcaggcgcctgtagtcccagctattcgggaggctgaggcaggaaaatggcgtgaacccgggaggcagagcttgcagtgagcagacatcgcgccactgcactctagcctgggtgccagagccagactccgtctcaaaaaaaaaaaaaaagattgtacttgacaatcctacaggaacaccaaggtacattagctaaggttctcattcctcctgtaaactatttggtaggactatcaatattgcttcgaagttttctttttctaaataccgcctctgtatcacattctttctttagatattttattaagcttaatcaacttcctcctgctctaatacaccatgtgtcaattttaaatcaacaaagaacacgtaacacaatgttagatgtcttcggtgaaaacatattctggccaggcacggtggctcacacttgtaatcctagcattttgggagggcgaggtgggcggatcacctgaggacaggagttcgaaaccagcccggccaacatggtgaaaccccgtctctactaaaaatacaaaaattagccaggcatggtggcttgcacctgtaatctcagctactcaagaggctgaggcaggagaatcacctgcacccaggaggcggaggttgcagtgagtcaagattgtgccactgcgctccagcctgggtgacagagcaagactgtctcaaaaaaaaaaaaaaattaaatattctctctgggtgcagcggcatgcgtgcctgtagtcctggctacttgggagactgaggcaggaggctcacttgagcccaggagttcagagttgtagccgatcaggtgtttgcactaagcttgccatcaatatagtgacctcctgggagtggaggaccacaggttccctaaggaggggtgaactggtccaggttggaaacaagggcatgttaaaaataccatgggcacggtagctcacgcctgtaatcctagcactttgggaggctgcggcaggaggatcaattgagcccaggagttggagatcagactgggtaatgcagtgagatcctgtccttattaaacaaacaaacaaaaaattaaaaataacaattcaaaaattctcatgctgatcagtaatgggattgtgcccgtgagtacccactgcacttggcaacatagcaagactctgtctcttaaaaataaataaattaaaaattaaaaaaacaaaatgttctttatggttacaactatatagtaagagtataaattctggagtctaggagaaactatagctttgccacttcctagatgtatgacattggacaagttactttacttctctgggcttcagcttcctcaactgaaaagtggggataaaaatcagtaccttcctcatatacttgttgtaatgaaatatgcatgtaaaatctaaaacagggtctcacaaactaagctcccaataaatatgagcttctatgtgtgatatatacacacatgcacacacattttaaggagaacagagaaaataactggaaggcaacactctcgaactctattggtggttatatgaagttggtataataccagttttttcctttccatatttccaagtgtaattaatataattttgataataaaataaggcaacagaaatcaataactgttcccacagtaaaaacacaatgtgcacagcattattagacattaggtaaagaagcagaaaggtctaactctgttgcttgggctagagtgcagtggcccaatcaaagctcactgcagcctcaacctcctgggctcaagcaatcctctcatgtcagcctcctgggtagctgggactacaggcacgcaaaacttaatttattttttgtagagacgggttctgtgttgccaaggctggtctcaaattcctggcctcaagcaatcttcctgcctcagcctcccaaagtgctgggattacaagtgtgacccactccacctgactagggaaggcttattaaaggaggggataagtggaaagaaggggcagagctgagaaggatagaacagaggcccagaagtggcaatgggcaggagagtggacaatggaaaggagagcaatgcagatgcaataaagggatcaattatgctgagctcagaagaggcaaatgactaaagaaagagtcttcaaagactaagtgggagaaaacaaaaacaaacaaaacttagctttataaaataagctaccactataccataatgacctcacccgtgagtaaaattatatctccaagaaacactgtaaatgcccaaaatgctgcagtcctccacagaaaaaccttcttcttagtttctgattgatcacttactgtaactgttgctaaaggcactttagagccagaatttggtccgaattttatgtttatttccttcacatggcatggagatagcaccatgactaaacaattatacttctggcttttagaatcacagttttttattaatgatttttttaatactcttaaattcagacacatttctccgatccatttctacagcagaatctcctccattagaaatcaacttcattttcttagctacttgaaggactctagatagagcttcagactgggccactttatcttcagaggtacagcttcttttaatagcacttttgtggaaggtatttagttgggaacacagtattcctgagctacacaactcaatacgtatctcatttggtggcagttcatcttcagaactgaaaagttcttgagatcctgtatgttcttcaagacctttatcagagtttatgtgaatgcggctattttctgttttaggacaaacaggactaaaaagttcaagggaatatgcttggttttgtccactttcatatgcttctgtaaaaccatcaagctgaatcgaattctcttcaggtattcttatctccccgtaacttgcctttggttcagtctccatgtttacattccctttatttacaggactccgccttttatctttcttttgagctaaaaaaagcaacctggctggaggtaattatactgagaaattctttatcagttgatattttaaggtctgagaccttcttaactgctgcttcagaccttgacttatctactgagttcgaggaaaataatcccaaacgctggttttgtatttcatgatattctgttggcacacactctctttgtaccacttcaggccctatattaattttttcagtactacaaaccaaatccaacacagctgcacatttatggcccaactgaaacaaatttgtgttaaagttctgaccacatatatctggctgatgtttaggctgttcatctctaattttattttcactgagaagctttgatacttttcttcttcggttaaatgcggaactgtgcttttaaatccacatatttgcatattagagctagttatgccactcagtctagaggagtgaatcttctgggattctatattctgtgtttcagaaacagaacgtacaaagtcatctttcacatgaacatgtctattcatacagtttgctaagaaatgaccacaaagatctggagaaccaatagaatctgggacttcatagttttcaagatttttgtgctgtttttcatccttcagatataaagaatgttgactgtataaaagctgaatttttttccaggggtcagcaacagacattaaagaagctgtgtcttctgatactgtcattttcagtggagcaactggagcaccccaaaaaatgtggacttgagatcctccactcatgatttctgataaaaatgaaaaatccaaaattaatatattgtcagcatatttttgcatatggatattaacttaataatgtaccaaaagaaaatataactgagtcaaaaacataattaacataggtgatttttttgatatgccatttaattatataaattcataaatacacaagaaattattaaggagaaatcacaatattcacaaaaatttttcacctaaagactctctttaggccgggcgcagtggctcacacctgtaatcccagctctttgggaggccgaggcaggtggatcacgaggtcaggagatcgagaccatcctgcctaacagcgtgaaacgccgtctatactaaaaacaaaaaattagctgggcgtggtagcacatgcctgtagtcccagccacttgaaggctgaggcagaagaatcacttgaacccaggaggcggaggttgcagtgagcctagattgcaccactgcactctagcctgggcaacagagtgagactccatctcaaaaaaagactctctttaagggaaataaagctaagcacactcacatcaaacaagttaataggtttttagtatgtttgtttcatttgagatggagtcttgctctgttgcccaggctggactgcagtgttgccatctaggctcactgcaacgtccacctcccaggttcaaccaattctcctgcttcagccccctgattagctgggattacagtctgtgccaccatgcccggctaatttttgtacttttagtagagacggggtttcaccatgtcggccaggctggtctcaaactcctgacctcaagaaatccactcgcctctgcctttcaaagtgctgggattacaggcgtgagccaccgcgcctggcctgtttcttatgttgtaaaaacttgccccatttaaataacaagttagtaaagaatgggaaaagaggcatttgtttaactatattacagtcacctttaaattagtcattttggggcagagcacagtggttcacgcctgtaatcacagcactttgggaggccaagggggtggatcacttgaggtcaggagttcaagaccagccaggccaagatggcaaaaccccatctctactaaaaatacaaaaattagccggctgtgatggcccatgcctatagtctcagttactcgggagtctgaggcaagagaagcgcttgaacccaggaggaggaggttgcagtgagccaagatctcaccactgcactccagcctgggcgacaaagcgagactccatctcaaaaaaaaaaaaattactcatttttggccagccatggtggctcacaccggtaatcccagcactttgggaggccgaggtgggaggatcacttgagaccaggagtttgaggccagcttggacaacatagtaagaccaccatctctacaaaaaaatttaaaaactaaaaaatttcttaaaattagctggacatagtggtggaacacctatagtcccagctactagggaggctgaggtgggaggattacttgagcctgagaggcggacattgcagtgagccatgatcacaccactgcacttcagtctgagtaacaaagtgagaccctttatttatttattttgagacagagttttgctcttgtcacccagtctggagtgcaatgacgcgatctcagctcactacaacctcctgtctcccaggttcaagcaattctcctgtctcaacctaccgagtagctgagattacagccgtctaccaccacgcccagctaattttagtttttttagtagagatggggtgtcaccatgttggccaggctggtcgcaaactcctgacctcaagtgatccacccaccttggcctcccaaagtgttgggattacaggtgtgagccaacgtgcctggcgagactctctttttaaaaaaatgattaagaatcactactattgctataactacatattccaacctcatttaatcctcatagaaagaataaccttcataaggaataactggtatattagctgttctattgcatgtcattattagatttaccactaggggccccaaatagcacagcaaaagccttcaagttcaaaatacattaatatgtcaaacccaagtgggaggagaaatatattatcttgaaatgttggttggggccaggcgtggtggctcacgcctgtaatcccagcactttgagaggccgaagcgggaggatcacctgagatcaggagtccgagaccagcctggccaacatggcgaaacttcatctctactaaaaacacaaaaatcaccagggcgtgatggcaccagcctgtagtctcagctactagggaggctgaggcaggagaatcgcttgaacccaggaggttgcagtgagccaagatcgtgccactgcactccagcactccagcctgggtgacagagtgagactctgtctcaaaaaaaaaaaaaaaatgttggtgggaatacttagatatatgcaaatcaaatgcataacattaccatgataatgaattctcctccatcagatctttggctttcttctccaatggtttcttccctttagcttcaaatctttattttattttattttattttattttattttattttttgagttagggtctctctctctcacccaggctggagtgcaatggtgcaatcatggctcactgcagcctcaagctgctgggctcaagctgtcatccagccacagcctcccaaatagctgggactacagatacatactgtcatgctcagctacaaatctttaaaaataaaaccaacccccccgcccccacaaacttgtttgttgtttcttacatctcatttctcctttaatcttcaaccacttctactccaaccattttgttataaaagttttcactatggaagccaatgaccttctagaagccaaatccaaaggtcagttttcaatacttttagtaccatttgaaactgtttatcaatccctcttttctgaaacattccgcttttttgactctgtgagaccaccatattggaattcttttgtacttaagacagatatgtattggattattccttcaatcactcacgtaacaaacactaaacattacgtgctgggcattatgctaggccctgggaattcaaaacaataatagagagctttaaggagcttaatttctgagaggaaaaacaaactgacaattataaaaagtgacaggaggccaggagccttggctcacgcctgtaatcccaggacttcgggaggctgaggcaggtggatcacctgaggtcaggagttcaagcctagcctaggcaacatggtaaaatcccataaaaatacgaaaattagccaggtatggtggcacgcacctgtaatcccagctactcaggaggctgaggcatgagaatcgcttgaacccaggaggcagaagttgcagtgagctgagatcacaccactgcactccagtctgggtgactctgtctcaaaaaaaaaaaaaaaaaaaaagtgataggagctactacaggattaaaaggaagggacagcatctctagaagagagaagcctggggcagttcaaccaatgtggaactgcccattatctgcatttttcgtaggctcttaggactacagttaatcacaaaattttgaaactgaattttattaatgttcagaaaaaaagtcatataataaagtccccgagtcattccccaccccaaaatagggcccaggaaagctgccctaattgccttacccaagggacaggcctactatgggtaatctccaaaatgtttaaaaggcatatacgacatttactgcttctgtgtcctcacttaatattttctcctaaatgttctgcaacctttcatttcctatctgtgataagacaataatgaagtccaaattgccaaataagaactcacagtgcttcaccactgcagttgtgaaactctctccttagtttctagaacattactctttcctaaattgttctacctctccaatttctctctctctctcttcctccttgggccacctctttccattccacacacctctagagaatttcatccaatcccattcatataactaccacatatacaactgtgctttacatatctataccgagccaatctctctcccaaacttcagacctatatttctagcattactatatttgataggatcacagtagaatcaaaggtgagattcaaagccctacttgccttctaggcaggggaagatagtagagcataaagggatgacacgaagcagtcctgagaattcagaggatctcccagggcaagaaatatctgagatgaatgtgagatccacaaaacacaaggtttttttgtgtttttttttctttttctttttttttttttttgagacagattctcgcttttgtcacccaggctggagtgcaatggcacaatctcagctcactgcaacctctgcctcctgggttcaagcgattctcctacctcagcctcccaagtagctgagattacaggcatgcaccaccatgcccagctaattttgtatttttagtagagatgggatttctccatgtaagtcaggctggtcttgaactcccaacctcagctgatccgcccgcctcagcctcccaaagtgctgagattagaggcatgagccaccgcgctgggtggcacaaggttattatatataactgttatttcagtgtgccttcacttatttgtctaaatcaggggtgtctaatcttttggcttccctgggccacaacggaagaaggagaattgtcttgggccacacataaaatacagttaacactaatgatagctaatgagcttaaaaaaaacaatcgcaggctgggcgcggtggctcatgcttataatcccagcactttgggaggccgaggtgggcagatcacttgaggtcaggagtttgagaccagcctggccaacatggtaaaaccccgtctctactaaaaatacaaaaattagcttggagtggtggcacacacctgtaatcccagctacgccagaggctgaggcaggagaatcgcttgaacccaggaggtggaagttgcagtgagccaagatcgggccactgccctccagcctggacaacagagcgagactctgtctcaaaaaaaatctcaaaaaaaactcataatgttttaagaaagtttacaaactcatgttgggttgcatttaaagccatcctggaccacatgcagccccacaggctgtgggttgaacaagcttggtctaaacaaatacccttgtaagtgtagaactgttaccctaccctcctcaccccccccccaaaaaaaaacttgactagaaagtggccctattaattcaaaaaatagtaaatttttaaaaagtgtttatatcaaaggctactgctactaaatactccaatttataggagttgtgagtatgtgagtaggaggatggaaactggcaagggcagggggaaacaaaatatgtatgatagccaaattatacagacagaaaagttatggacaactgattaatttcaataattctaggatatgttttaggtgtactcagagggttaaaggtcattaagataccagatgaaacttgcaagtacatctccattaccgcagttaataattatacaatttctcaatctgcagaaggccgcttcagtcggaaaaaccaatacaaccataatcctttatctttagagtggtcagagtctgatgaatgggtcaaagatttctaaaacaggatgaattgtatcagcaggttttgtctttgcagaacactgcaactaaaaaaaaatgcttattacaaaacatgtatcattaaaagagagtgcttttcccctcttattaccagggagtgaaaaaactccctgtagtaatgccttttcatgtctattttaccaaaaacaccaaaaaaatcataaagttgctcaatagcatcaaatgacaaagaagccacatgggattgtaattaaaagcaagggatttggaacaagagagatgtgggttcaaattactactctgcaacttactcaaacttgaaattattgaagttaagtgatagttgcatggggttcattatactatcctttgctggtggttaaagaaagtcatccttttattctttgacctgattgaaccaaattcaatttgctatcatagttcatttgtgttaacaacacagtactaataacccacgtactgtgtatattcatgctgaactcttttaagaattactaaatgctgggaggctgaggcgggcagatcacgaagtcaggagatcgaggccatcctggctaaaagggtgaaaccccgtctctactaaaaatacaaaaaattagctgggcgtggtggcgggcgcctgtagtcccagctactctggaggctgaggcaggagcatggcgtgaaccagggaggcggagcttgcagtgagccaagattgcgccactgcactccagcctgggcaacaaagcgagactccatctcaaaaaaaaaaaaaaaaaaaaaaattagtaaatgcttgtacctaaatttactctttaaaataatagaaaatgtccactttttatgcaacttatgaaaagatataagatgatttttttcctcagaaacaaaagcagttgaagtttaaagctatcgctcatttagtatctcaaagtaatagccactaaagccaacctgtgagcagacaactgacttctcgactctctttgcataacttttaatttcctttgcaattgtctttggtattcaagtgagacatctgtaatcacattctcatcaacaactgagatgccttaggccagtgtgggtgagcctctcttattctggcttgcaatacaacgggaatttctccctttcactcttgttccagggcatttgccttctcccaataaagtccaagcactcaaacagaaagtgaactttactctagctggttttctggccttaggaatagggtgaggccaggtgcagtgggtcatgcctgtaatcccagcactttgggaggccgaagtgggcaggtcatgaggtcaggagttcaagaccatcctggctaacacgacaaaacccccgtctctactaaaaacacaaaaaatttgccaggcatggtggcatgtgcctgtagtcccagctactcaggaggctgaggcaggagaatcgcttgaacccgggaggtggaggttgcagtgagccaagatcgcgtcactgtactccagcctgggcgacagagcgagactccgtcacaaaaaaaaaaaaaaaaaagaaaaagaaagaataaaaagaataaggtgaacatgccttctgatttgcccagaacagtcctagtttaggcatgcccttctggtgtcctgtttagtcaggatcttttttccttctcaaagggttggagatagactatatggtattcctagttaagaaccatataaacacatgaataaatattctattaatgaagaatgtgccttctaatacactttatctaaaatattataacaggattaacaggtaaagggaaacattgctcagttttcctgttaaaatatttaaataacaatgaaatactaattgaaataaggttgaattttgtctaaaaactatgatacacatttgagactctcaagactgaggtaagactcaaatgaggtaagacagagaacccatgtttggcaactaagggggaaaaaagaggatcatggccgccaggtctgtgtaatgaagctatgagacaatgggataagagttttttggatccagcattactagaaaatgtctcagcccagatgtcatttgtccaatgtcacgcctaaggtcgaagaagaaatcctcaaattcctaaaatatcacactttgcctccccatccacaccatgcaacatcaaaaggccagaatttggccacgcacggtggctcaagcttgtaattacagtactttactttgggaggctgaggcagacaggttgcttcagctcagtagttcgagaccagtctaggcaacatggtaagactatgtcgctacaaaaaattttttaaaaaaattgctgggtagggtggtatgtgcctgtagtcccagctactcaggaggctgaagtgaaaggatcacctgagcctgggagatcaaggctacagtaagccgtgattgtgccactgcactccagcctggatgacagagtgagacactgtctctaaaaaaaaaaaaaaaaaaaaaaaaagtaaaaataaaaaggactgaactttaagactagtaatcatgaactcacaggtaggtgccaggggtatgcctgccaacccctgtgcttgctttcatctccacccacctcccacaaaagatgaaaaacaaaacaaacacaatcaagaaaaattaaaaaaaaaaaaagaactttgctacttacgccttgacattcctttgtgaaaagtcatactcagcaaataacaactccactatcccaattccccaggccaaaaaccttggcatcatcactgatatctttctttttccccgtgctctacttccaatttctcatcaaatccttttggtcctatctttaacgttcattcagggtttgaccacttttctccacctccacctgctactgcctggctcaaatcaccatccttcttccaccaccatccccctagaaaacagagtttacaaaaggaacttgccccaggtcaggaagactgcaggtagtggagggagtactggcatgtaggaaatcaaacagcagaacataagttcttaactaccacactgactctctggttttttgcctttgcacaatgtggagctagaatccaagttagaacactgccattgagtcatatgacatatgctcctaaagcactgatttatctaaagaggtatgaaaagaataaaacttcagcataaaggagcttccttatcaaagaattcccataagaaagttcattataacttaatgatggggtaaataactggtttttaagaagacttctctccttttaaaaatttattttttattcagctggtaagtacaagagaatttttttttaatttattttttaaactgtcatattgtaattgtacatacttatggggtacaatttgatttttttttttttgagatggagtcttgctctgttgcccaggctggagtgcgatggcgcaatctcagctcactgcaacctctgcctcccaggttcaagcaattctcccgcctcagtctcccgagtagctggaattacaggcatgcaccaccacacccagctaatttttgtatttttagtagagatggggtttcaccatgttggccaggctagtcttgaactcctgacctcaggtgatccacccaccgcagactcccaaagtgctggaattaccagcatgagccaccacgccgggccacagttcgatgttttgatacatatccatgttgcataatgatccaatcagagcagttagtgaaagaacattcaaaagcccctcttccagctattttgtaataatattttactcttaactatactcaccccactgtgcaatagaacaccagaatttgagatcaggagtttgagaccagcctggctaacgtgatggactaaaaatacgaaaattagctgggtgtggtggcatgcacctgtaatcccagctacttgggaggctgagggaaaagaatcatcttgaatccaggaggtggaggttgcagtgagccaagactatgccattgcactccagcgtgggcaacaagagagaaactccatctcagaaaaaaaaaaacaaaaaaccgaacaccagaatttatttcttctcattgtaacattggtttatgtgttattattgagaaaggatcttgctctgtctcccatgctggagtgcagtggcacgaacacagttcactgcagcctcaacctcccaagctcaagcaatcctcccaccttagccacctgagtagacaggactacaggcccatgccaccatgcccgcctttttaaacttttttttgagagacagggtctcactatgttgcccaggcttgtctccaatttctgggctcaagcgatcatcctaccttgacctcccaaaatgctgggattacaagtgtgagtcactgtgcctcgcctttttttggttttgttttgttttgagacaggatctcccgtcatgctttatcaccctgggtggaatacaattatggcttaccgcagccttgacctcgtgagttcaagcaatcctcccacctcagcctcccaagtaagtgggattacagacaagtgccaccatgcttagctaactttttatatttctattttttaatctttgtagacataggggtatcactatgttgcccaggctggtctcaaactccgggcctcagcatcccaaagtgttaggattacaggcatgagccaccatgactggcactaattttattattacatacctaggtatgattatatttgtttattctatttagagttcactgagtttcttggatctgagagtttatggttatcatcagatttggaaaatttatagtcactgtttctttttcttttttaaggaaattgcccaggctggtcttgaactcctgtgctcaaaaaatcctctcatctcagcctctcaaagtgctgggattacaggcatgagccaccatgatgagccactattttcttattttctttttctttttctttttctttttttttttttttttgagataggttctcactctgttgcccaggctgtagtgtagtggcatgatcttggcttactgcaacctacatctccctggctcaagcaattctcatgcttcagcctcccaagaagctgagattacagtcgcatgccaccaagcccagctaatttttgtatttttagtagagaagagatttcaccatgttggacaggctggtctcaaactcctgatctcaaatgatctgcacccccctcggccccccaaagtgctaggattacaagtgtgagccacccacctggccacccagacgctgtttcctaaagtaattccttctacctttccccacttttctggaactccaattatacatgtattaggcaacttgctattgtcccaaggttactgatgttctattaactttgttctagtattttttttctctttgtgcttcaatgtgaataggttctactgctataccttcacatttaatgatctttttttccgcagtgtctaatctgctgttaatcacatccagtttttcccccagttttggatattatatctggtatttttcatctttagatactacttgtgagtcttttggttttttttgcgacaaagtctcactccgtcacccaggttggagtacagtggcatgttctcagctcactgcaacctctgcctcccaggttcaagcaattctcgtgcctcagcctcccaagctggaattacaggcacatcccaccacacccagctaatttttgtatttttagtagagacagggttttgccatgttgggcaagctgatctgcctaccctcaagtctgtaggcatgattcaccacatctggcttgtgtctttttatctatcattcatttctctactagtcattataatacttgtattaacatatttggctgataattcaatcatcagaattatttctaataattccacatttctaggtctcttttctattgatttttctcctggttatgggtcattttcctgctttttatttgtatgcctagtaatctttcattaatatattattaatgctgaacattttaattgttaggtgctggcatttactgtattctttaaaagagtttagttttggcacataattgagttacttagaatcagcctggtcctttcaaaacctgccttgaagcttagggtaggtttagaaaggcctttagtctatagctaatttaaccccactttgaagactctagccaatgtcctttgtatgaaacagtctctccactatgcctaatggaaacataaactattcccagctctgtgtgagctcctggaattgttcagtgttctgatttccagtgtgactttctccagcattgctgacttccacacttcacatgtgcagatgagtgtccaatcaaagattctcttacttctatagatttctgtgtagttccttttattcttgttttctgccccacaaattctagttgccttgacttctccaaactctcctgggctctatttggattcccctactctgtgctacaatctggaaactgcctataggaacccctgtagggttcatatcagttatttcccttctctcagggatcactatcctgtgctgcctgttgtccaatgtctgaaaacagttgtttcatgtatttttgtcctgttttctagctgtttacagtaggagaatgattctcgtagcggttaatccctcttgggcagatgtactgactttatggtatccctgtttgtgtttttagtgcttgttctagagattacatatgcatccagaagttactacagtctcctttcacagagtaagaaatgtatgacagtataattccatctcctcctttttgttctttcatggttgtataatcacatatatgctgtaaaacccacatcttgttaatgtgtatgttttaatgttttttgagtccaggtctgctggaaacaaattctttccctttttgatatgtccaaaaagtctttattttgccattatttttgaaggctatttctgctggccatagaaatctaggttaacaggttgttttttttttttttctttcagctctttatggatgtcatcccattgtatttaacattctatttttccttttcttttctttctttgtttttgagactgagtctcgctctgtcgacaggctggagtgcagtggcacatgatctcggctcagtgcaacctccacctcctgggttcaagtgattctcctgcctcagcctcccgagtagctgggactacaggtgtgcaccaccacacccggctaatttttgtatttttagtagagacgcagtttcaccatgttggccaggatggtctcgacctcttgaccttgtgatttgcccacctcccaaagttctgagattacaggtgtgagccaccgtgcctggacttcttttcttttttaaatagagatggggtctcactactttactcaggctggactcaaactcctgggttcaagcatgtgccaccatgctcagctaagactccatttttttctggtcctaaaacatggaatagccataacccatgttgccattctcacataactaatgtgtcttttattctcctgttgctctcctgttgcttgtaagatctcttccatcttcagttttcagcagtttgattatgatatgcctatatatgggatttttaaatttgttggcttatttttgttttgtatttaacttgcttgggatttgctgaactccttccatttgtgaattgatgacctcatcaattttagaagttcctgagcattgtctcttcaaatatgtcttctgccacgttctcttctctccttctgaaactccaattacatatatgttagaccatctgatattatcccacagatctaaaatctcttttctacccctccctgactttttctgtcttttctctttccaatctgtcttcatattcactgattctttcttctgctatgtccataaactgttaagcccatgtaatgaattcatttctgctagtatatttttctttctcccttccctcccctcccttccctttccttttcttttctttcctttttttgttttccctggtctctgctagtatatttttcacctctatttaatagaatttcaacttggttctttggcataatttccatgactctacagaaatccccatcttttcaagcatattgttaacctttatcattcaatcatctagcatttttttcataattatctttaaatccctgtctgataaatctggatcatctctgggtcttcttctactgactatttcttctcttgacctttggtcacattttcttgcttttcttgtgccttgtaacttttcattacacaccagacattttatataaaaatagattacttattaaattaagtaatattttacttccagaaaaagacatgacaatttttctgttaggacactagaagggagtctgagtcaatccaatatgtaactgagctgggtgtgggctatgatgcagctttaatttaacattaatcactggcttcaaatatttaaggactgagatcaagcctttcacttgagcaggtctgggatctgagcctaggtaaaattacagagacctgcttgtgtttcatagccaagccaccaatttttaaaactgtgggagtaccttacatgtatactagagtagaatgattaagtaaatgggtggctgatggtaggagacagatttctcactattggagcaggagttttcagataagcaagggcaggaagttagaatcatccatgtagtgattcaactggaacctaatacatcaatataaactcatgtttagcttaattagatacggatggatacatatagaaatatttatagatatgtggatatatacagggtagtataaatacatacattttctggctctgtcagctgagatggcctacaagcaaaaacaccccagtagcaacatgtacacctagcacctagatcttggtttctccattctccagtaaaaggaaccaaggctccatggagaaatggctaattctaggattgagacagaaaaatatactagataaagcatatactaaagcatatactacatgctttagtctctaaatatactagagcatcttgtagtgccagaaagtgagaaagtgcaaacacacatacacacatatactgacagtggtatatcaaaaagtcataccaactgaaagagctcccagtggccaaagctggaacaacttgaacaataaaataaataaagcaataataagattttaacccaaggtataaaatatccataagtccatactaatattttaaaaattgaatggataaataaatgaggaagaagagacaaatcttccatgcagaagaaatctaaataatttatacagacactttgcccttgaggaggggtatcataactccccatgccttaagtgtaggctgcgcatatgtaacttccttccaaagagtacagtatgtaaacagaggagaaaaaagagtaactttgtagtaaagaaatacacaaacactacctcaaccagatgatcaaggtcaatatcaacactgattagtcatattgacagtatatccccttaatatgatgtgatgaaaatggtactgccaagcatagtggcacatgtctgtagtcccaactacttgggaggctgaagtgggaggattgcatgagcctaggagttcaagaccagcctaggcaatacagtgagactctgtctctattaaaaaaaaaaaaattagccaggtgtggtggcatgcatctgtagtcccagctactcaggaagctaaggagggaggatcatgtgagcccaggagttcaaggctgcagtgagctgtcatcataccactgcactccagcctgggtgacagagtgagacactgtctcaaaaaaaggaaagcaaattgtacttcacctgcatgttcttcgtcccaaaaatacaaaacctcactgtaacaatgacaaaaataccaaacagatatcaatagaatgacattctacaaaatacctgaacaatactcctcaaaactgtcagtcatcaaaaacaagagatgagaagctcaagtctaagaaaatgccaaaaccaagaggaccctaaggagacgtgacagctaaatgggatcccaaaacattaggtaaataaagtatggactttagttaatgaaaatatatcagtattagttcattaattataacaaatataccatactaatataaggtgttaaaaataggaaaaactaaaaaaataaataaattaaataaaaataggaaaaactagaggcagcattatgggaactctctatactatcttggcaatttttctttaaatctgaaactgtttcaaaaattcaagtttatattttaaaaaagaaagaaaaaaaagctgtaggaactctatctctgcattaagcgccacggtcagagtttggtttgctagattctccttgctctccagtcgcacaccttgctttctgaagctcaggtgccctcgtgcagccctgctcctcctccccagccaggcttctggagggcagcttccttacattctgtgaaggcctgaaatgaattagagcagtttcactcacctcttctgccctgtccccagtccttggtggctgaaaacatggactgccagagtgtggggtgagagttatttctagctcttcccctgcctgcagcattccagaactgaaagcctggagagcctctgctggatttttctcagcaatcctgccttctaagggtggttgccctatacttgggagaggttccaaatgcctcaggtattatctatgccagttcgtcactggcccaggcttttggcttactactcctgaacattcagtgaacatctgtgggtaggagctggagtgtgggtgcatacttgctctttggtgccagagttgctagggcttcttaggatcctaacctgtcaaaccagcccatacgtggccattaaaaatctgattttaaaaaaatgtggctggtttctcctttcccctcatctatggtggattcctattcctttcgttgttccatcctagagcaaccatgggtttcttctccactatgaaagtttgattactttctggagtttggttcatttaggctcccttgtatcctcagctcttcgatgggtttttagaaaccgtacttcttatcctgcttttataggttttcagttacaagaatggcaatatcttgtaattttgtacatctgaagaggaagctgaattctttccccagacctcgaatggttcactccctcagtacattaaggtctctgctcaaaagtcatcttttcaaagcagtttcccgtattacactatctaaagattgaccagatctcagtcacccttcatgccttcatcctgctctactcttcttccattgtcctcatttccatctgaaatgtatttgtcccattttttaactgtctcctccacaagggcaggaattttatttttcttatttgtcagtatagccccagctataaaacaatgatagggagcaaatatgattctttataaattataagtttaagcttgttttaaaactaattaactaaacagaaagttattgttgcatattataaaagaaaaagtactttcatgggagataagaagttttgaagcttaccaaaaaagaacctgtgtgatcatccttagacaacatattattctttaacatatatactttttccagctatatcgttctgtgtacacttagtgcttcctgatatcctgctatcaacccaggttctaagcaggaattacagatattcttcacaatagaataagacaattaacaattgttcttaatgaatggtaaaaagaacaatattcattacttgctaattattactcatctttttttgaaaatgacccaaatggcatctggaaacagcataacactaaaaattagattgcaatagaaaacaagaacaacgttttgatgattaaacataatagaaaggactgtagaaggagaacagaaataagtaagaaggaaaaatttagatattgcagaagtgatacagtaaatctaaggatttcaaagatattaattaaatacctcagattaatcaagaggcctaatgcacaaactaactggtcttttaaaagaaaccaattgggcacggtggctcacaaaataaaaaaaaaaagaagcaaaacactaaaaaaattaaaattaattaaaaattatttttttccattgctagagattttctgtctagacatcaatggcaaaactccacataaagcaatatagttaagaaagactactttggaatcagatcttaatgttaatctcagcttcatcatttgccaactatgtgacctttggcaagttaaccttccaaaacagcatctaaggttttagggaccattgagcccttcaacaaatatgtgagtactcattcaggacacaacaatgaataagattaatgaaaataattcacgaaaaaaacttagaacacatctggtacccaataaaagctcaataaaatactataacaattattatctcaaatattagataggattccaaacccccacttaatgcagaaatatagtcggttttgttttgttttgttttgttttgttttgtttttgagacagggtcttgtcctgttgcccaggctggagtgcagtgctacgatctcggctcaccacagccttgacctcctgggctcaagctatcctcccacctcagactcgcaagtagctaggactacaggcacgcaccaccaagcccggttaatttttcattttttgtagagatggggtttcaccatgttgccctggctggtctcaaactcctgagctcaagtgatccatccgcctgagcctcccaaagtgctgggattatagatgtgagccactgcacctggcaaaatataatctttaatattaataacaacaaatacattatcatggttaaaaatagctttttgactgtggttattggtgtaactaacttcacttctgctgggaccacattttggaagcaggccaacttccctttctgtcttaagtaatttcttatcagtcctttataacccttgtgtcgtaataccatttactgggggagaggagagcacctaaaatataatccttccaaataacctggtaaataaacacaaatgacaccaattctgtcatcattacatcacaaccatagaatatagatgagttcaaggatcaaaaataaaaaagtaaaaaacatctagaggcaaaagatttgaaaatcatgtatctaaatttgaaaatcatgtctagtacccagaatgtataaagaactcttacaactctacaacacaaagacaacacaatttaaagtgggcaaaggacttaaacagacatttctccaaagaagatatacaaatggccaacaagcacatgaaaaaaggctcaatgtcattagttactggggaaatgcaaatcaaaacaaaaagataccactttacacccactagaatgactataataaaaagtttttaatggaaaacagtgttggcaaaaatgtggagaaattgggacacttgtgtattgctaataggaatataaaatggtacagtcactgaggaaaacagattggcagttcctcattaagttaaagacagaattaccatatatgatccagcaattccacaccgagctatatacctaaaagaataaaaacaaatgttcacccccaaaaattgtacatcagtgttcataacagcactatttacaatagccagaaaaagcagaaacaacccaaaagttcatcaactgatgaacagataaacaaaatgtgatatatccacacaatgaaaattattgagccataaaaaagaaggaagcagtgatctatgctataccatagatgaaccacaaaaatattatggtaaatgaaaacatgtgacaaaaggccacatactgaatgacttcatttatatgaaatatccacaaaaggcaaatccatagaaacaaaaagcacattcgtggcttccaggggctgggggagggagggaatggggagtgactgcttaatgggtatggggtttctttttggtgtgatagaaaagttctagaactagaaagtagtgatggctgtaaaacattgtgaatgtacttaatgtcactgaactgtatacttataaataataaattttatgtatattttaccacaacaaaaaagatgcttaacaaaaaaaaaattagaaataagttctgggtaaagagaagatggaacatacatatatttaacttcatttcttccccaaattgtgctaaaatactaataaggtttttggggtttttttgtttttgtttttgagatagggtctcattctgtcacccaggatggagtacagtgacatgatctcagcacgctgcaacctccacatcccaggctcatgcgatcctcccacctcagcctcccaagtagctgggaccacaggcgtgcaccaccacaccgggttaatttttctatagtagagacggggttttgctatgttgcccaggcttctctcaaactcccagatgcaaggagtctacctgcctcgacctcccaaagttctgggattacaggcctgagccaccacgcctggccctcatcaggtatttttaaggcataaacaaaacttaaaagctagaaagcaaatgcataaatggtaactgacatagcagatccaagaaaccagcagtatggaaagccaaaaaccaaccttcgtccacggaatcttcaaaaggctcaggaactggtaacagatagcgcctgtagaaacaggtgtgaagggagcactaaataaagaaggctggctgaaagctccttaggaaacgctcaatctctcagtaccttcctaaataccacatggttaggttactatgcttttcccaccaaggcaaaattctagaggattattccctcaggaggatttcagagcagggaaacataaagcacattggtgcgggggaggcttaatgaaaacagaggccttaagaaaacacatatgtactgaatactgaaatcctcactgccctacttccctcactctctcacagaagtggcatacagacctcctcccaccagacaggaaattaaaagacctctctcccttttcagaaaagggaaaagtaatcagaagctgacatgaagggtgccccagcaaatgacacagatagatcaccctagagtgaactctagtcaacaagtaccaatgaggtactaagagcttccaatcagcttttagaggcataactgcaaacagccaaggattaccactcatctgaggaaagcatctaccacaaaaagaaaacaaaggaaaacaaaaaatagaaaaggaacttggaggaaacacggacaactgtgggaagaaaaaaacttaaaatttaaaaagaattttattagcaggaatttctgatgtcaataaaaaataaataaataaaaggaattttataccccatcattagcgtccatggaaagaatacagaagatactacactgtaatcccagaattttaggaggctgaggcaagagaaatgcttggcgcttaagagttcgagaccagtctgggcaacacagcgagaccttgtctactaaaaatcaaaaaagttagctaggtttggcggtgcaggcctgtagtaccagctactgggagggctagggcaggaggatcgcttgagcctgagcaatcaaagctgtagtgagccacgacagagcaagaccctgtgtcaaaagagtagatactccatccatgaaaaaaaatcgatacttttccaaagagctctcggaaattaaacttaggaaaatttatcagaaagaataaggaatcaaagagatggcaacagaatcaagaagaaaaaactggaggtccagtcaagataattcagcatctatgcaatggggaatccacaggagaaaacagagaggaaaaaaaaccagtgaaataattcaagaaaatgtcccaaaactaaacaatgtaagtttcgtaactgaaaacactgagtgaagccaggcacggtggctcacgcccataatcccagcactttgggaggccgaagtgagtggatcatttgaggtcaggagttcaagaccaacctgcccaacatggtgaaaccctgtctctactaaaaatacaaaaaaattagccagtcgtggtggtacacctgtaatctcagctactcgggaagctgaggcatgagaatggcttgaacccagtaggcggaggttacagtgaaccgagatcgcaccactgcactccagcctgggcaacagagtgatactctatctcaaaaaaacaaaacaaaacaaaacaaaaaaacaaaaattggcttggcgtggtgatgcacacctgtaattccagctactgggtaggctgaggcaccagaatcacctgaacccaggaggcggaggttgttgcagtgcgccaagatcatgccactgcactccagcctgggcgagagtgggattctgtctcaaaaaacaaacaaaaacaataaatttaaaaatatataaataaatttaaaaattaaaaaacaaaaacaacaacaaaaaaacactgagtgcagagcataattgtttaaaatacagtacaaccatattaaagcgtatcatttacaagtttcagaacagtggaaacaaagggaagatcctacaagcttccagaagagggaaatggctaacaatagataaacttccagaatgattttgtactttcaacaggcataacacaagctagaagacaatggagcaaaatcatcaatctcaatgttacatacagtgaaaccactaatgaagggtgagaggaaaataaagtgttttcagaaaacataaggtatcaaatatttgcctcccatgaaacaggaagacataagaggagaagaaacagaagtgccaatgcaggagaaaagaaaagagaattccaaggatgattgctgggcactatgagaaaacagagactactccatgttggagcactgtgctctggaaaagtcttcttcaagatgatgaaactgacaaagtaagtgaaggaaatgggaaatttgaaagaaaatgggaaatttggacaactgatagaatgtttaggttgagttagtcacaaggacacagcaaatcatgcaaataatttatgttctaacctgaaaattcaagtaaatcaattttttaaatgtttcttgaaaaaccgcaggtaaattccaaatacctatgagttgaggatggttacctatgagaagaggaaatgaaggtggaggctgagaattactgtttgttttaagaatccctgaaagaccacttgactcattaaactgtataacatttgaggggaaaaaaaattaagattaaaaagtatggaatatgggaaataaggtactgaggatttcccaaggacataaagcccaaacaaacctgacccctggaaactaaatcttacaaaattgccctgtaaaagaaaaacataaaaatgaattagagggaaaaagaaggaacattacttgcacgacatcataactccagccaaatgcatgacattgacagcagaaatccttgggtttctgtgcttctgctccctggtctgtcaagtgggtgtaataaccacagcattcctctcttaggactgttgtaaagcttaagtgagataatgcacataaaacacttatagcaacgctggctgtcagtattaacacagttgtgttttttctaataactgagatcctttttcatatcaaataatttcactgtcacaatgatcttgaaacgtttatttgaatacttaccttgtctacccaaacattcaaggcctctaatgctctcacataagcctcccaacaaaaaagtgggaggcggggggtgggggatggggggggcgggtaagagggacaaaaaacattctgatgatccatatccaagagaaataggaaaaacaactagtaaagaattagtgaaagttatttctaaagattcttgttctactgaagaactgactgtacctaaaaactactcagtagtttttatactttttagttgccgtaatcaatctttcactctcactaggcaagttagcaattaagagtgaaaactttctaccagctatacattaactcagtaatgctaggacaagcatttttccatttcacaataggtagcctccaacttatgcacagattgtgctctccaaattgagttatactttgttataaaacttgtgaaacgtttcctcaaagaaataaaattatgaaataaagttgggatcccaggcaataaacaaagggcaatttaatccatagagtagaacaatttattcctaagagccatggaaaaggaaaggaataaatgtaactgtgtcagatgactttcaaccacttattttgtgctccccacagctagtaaaaaaaaaatagcatttatgtgagattaggaattgtgtaatactttgttctcttcatctttgtattctggtaacacaaacagcatataacacagtacctgccttctatcaggagcttaaaatattcatttaaggaataataatgagtatgaatatatagcactgttcaaaccatactgtttcaatggagaaatacattatcatgatttccaactgaaagaatgtcttcctttatcttagcaggacaactaaagtttaagcaccaagaacaataaagtgtacgcagctattccacggatgtaacaatcattcctcctagaaatcatattttggtcacacatcactcagactatttctaagtatgtataaatcatgaagttgagttttaataatataaaacttgacctccataatgtccctgacttcttttcctttattaataccttaaataaaaatagcagccatcaacattttacctgggtttttttttttaatttgcagtttctatactacttctagttagtacagaaggttatcaactgcaaacttaatactatggccaaaaaaacaaaatcaaaaaagtcattaagactcaatattcagacaataatcttgattaaaacccagtatttctcaactgggtgtggtggctcatacctgtaatcccagcactttgggaggccaaggtgggaggactgcttgagcctaggagtttgaaaccagcctaggtgacatagcaaaattccatccctacaaaaaaatttaaaaattagccaggcatggtggtgcacacctttagtcccaactacttgggaggctgggttgggaggatcacacgagcccagaaggtcaaggctgcagtgagccatgattgtgccaatgtactccagtctgggtgacaaagtaaggctgcctcaaaaataagcaacaacaaaaaaacccaatattcctctggctcgaatgcagctacctgtatttagatattcccaaagtgaagttgacaaagttatccaacacaataacagaaattattttaggtaccaaaaaaattgcaaaaattactgagaattattattattattattattattttgagacagagtctcactcttgtagcccaggctggagtgcagtggcgtgatctcggctcattgcaacctccgcctcccgagttcaagcgattctcctgcctcagcctcccgagtagttgggattacaggcacccgccaccacacccagctaatttttgtatttttatttttattatttatttatttatttttgaaatggagtttcactcttgtcacccaggctggagtgcaatggcacattctcaactcactgcaacctccacctcttgggttcaagcaattctcctgcctcagcctccccagtagctgggatgacaggcacccgccaccacgcccggctcatttttttgtatttttagtagagacggggtttcaccctgttggccaggctggtctccaactcctgacctcaggtgatctgctgccttggcctcccagagtgctaggattacaggcgtcagccaccgcacccagccaattactgagaattataagttaaaattacagaatttagtagacaatgtagtcaatgtccacaatgatactgatatcttaaaacctgagaaattcacctaacaaaagaagtcccttaattttacattactctaaaaaaaaatttgatccctttaatatatccctaagggaataaagattaaaggaataaagattaatttatcctagagagccagagttcacttcaagctttaaggaataattcacaatcatccaaacataaaattcagatggacaccttaaatgagatatgagtttcatctagcatcagaaatcactccaaaggcattatttctcttaagcaccccttctgctttgaaattcaatactgccaatgaaaccaattaattttatttctttgtaatgacttcataggacaggcatggtggctcacacctgaaatcctaacactttgggaggccgaggcaggaggatcacctgaacccaggagttagagaccagcctgccaacatagtgagaccctgtctttacaaaaaataaaaaacaagctgggcatggtggcatgcacctgtagtttcagctactcaggaggctgaggcaggaggatcaattgagcccaggaggttcaggctgccgtgagccatgatgatgtcattgcactcagcctagtcaatggagcaagattctgtctcaaaaaaaaaaaaaattttttttaactataatgactttatctcacgcaaatttacaaagggtgtataaatatttgttaaaacaaatataagaggttgagttgataatcaccagtgagcgacagcagcagagacacacggtcatcagtgaaggagacagaaacatctctaaaccacccaacacaattaacgcggtgtcttccacatagacttttttcttttttttgagatagggtctcattctgttacccaggctggagtgcagtggtgcgatcacagctcactgctgcctcaacctcctgggctcaagtgatcctcctgcctcagcatcccaagtagttgggaccaaaggtgcgcctcaccatgcccagctgatttttgtattttttgtagagacagggtctcaccatgtttcccaggctggtcttaagcccctgggctcaagcaatcacctgcctcagcctcccaaagtgctgggattacaggcatgagccactgtgtatagcctcacatagattaagtgaggtcactgtatgtgaggtcattgtataatatttttcaaaaatgttattttacttccaagaaattataaatacaattagttatatctactcctgtcactttaaactttattatatcaatttttattcacaaaaacatgcattatttcagacattataattaatgaaacaatttttattcatttgctttaagttcatttcaaatccaagattcatattataaaaccactctccctccctgaactacacatctctagttaaatttagattcaataatgttttccatggaaataacaaaactcaagtcctctgtattagtaaactgtgtaataaaataggaaatttactaaggaagagcaaagcaggagccctgtatgtcacttttagataactatcctcaaactaaactaaacactttcaattccaagcgtatttcaaagttttaggagaagcaggtggatggagtaaggagatcgtgagaactaactcactactgcgaggacaacactatgccatgagggatctgccccatgacgcaaacacctctcaccagaccccacctcaaacactgggaattacaattcaacataagatttggtggggacatatatacaagctctattagggtgacggcaaaattctggaactagataatggtgatggttgcataacaatgcgaatgtacttaatgcaactgagactttcatgctgtgtaaatatagatctcagtcaataaaagaaacagtacaccagcctggccaacaactgctaaaaatgcaaaacttagcgaggcatgcacacctgtagttccagctaccctggaggctgaggtgaaagaattgcttgaacctgggaggtgaaggttgcagtgacccgagatcatgccactgtactccagcctgggtgatagagtgagaccctcacttagaaaaaaaagaaaaaagaaaccatagcactatataacagaaagtagacattgacatctcattgaagaaagtcaccttctaaaataaatgttgattattttggtatccctttaaaaatcttactgggactcatgcctgtaatctcagcattttgggaggccaaggcaggccttgaggtcaggaattcgagaccagcctagccaacatggtgaaactccgtctctactaaaaataccaaaaaaaggccaggtgcagtggctcacgcctgtaatcccagtactttgggaggccaaggcgggtggatcacaagttcaggagtttgagaccatcctggctaacatggtgaaaccccgtctttactaaaaatacaaaaaattagccaagcgtggtggcaggtgcctgtagtcccagctactcgggaggctgaggcaggagaatggcgtgaacccgggaggcagagcttgcagtgagccaagatcaagccactgcactccagcctgggcaacagagcgagactccgtctcaaaacataaaataaaaataaacaaaaataaataaataaaaacaccttattgttaacttgataagtaaattataaacatgtcaaaatgaaatcttttactatagtgtcaatccttgagcttttctatttgttaggaattctcataacactcttagcaccagctttccaatgcttagtctgccagggcaggaatcaattttatatagtgttgggtgtccaagggagataatacagtcctgggttcttagtttctatttctggttgggccagtaaagccccttcctcatccctcctttccacttatcactacagacagaaactaaaaaccatggcttcaggctgctaaaagcatacaataaaacaaaatcaaacaacaaaataaaaggaaggatggacaggctaggaagtgaattttaaaatgggcagaatatttgattaaatttagcttgccaatattgtgttaaattttaatacaggagagtaacatctttatttctaataaacaagatcagcaaaagatgaaaaactttttagataccaaaatataccttggtctgctgtagcacttgggaatcataaatctctcttgtggcactcatgaatgtagccttttttttttttttttttttgacagtcagtggagaaagacaacatggaaaaaaaaaaaagccacgccaaatgcaataacaagcccatcaatttctgttacctcaaatgcaatagaaaataccacttttggccaggttcagtggctcacgcctgtaatcccagaactttgggagaccgaggcaggcagatcactggaggtcaggagttcaagaccagcctggccaacatggcgaaaccccatctctacaaaaaatacaaaaattagccaggcatggtgacatatacctgtgatcccagctccttgggaggctgaggtggaagaatcgcttgaacctaggaggcagaggatgcagtgagccgagatcacaccactgcactccagtctggccatcaggacgagactgtctcaatttaaaaaaaaaaaagaaagaaagaaagaaagaaaataccacttttgctgaacctgattacaggcaaggccaaattcagtcacttgcataataatatgcccaacattcgttcacaatgttcctgcctgctcttaacgggctttgagtagagcaggctctcaaaagccatgaattatatgaattatcaaattaaacaacagtttccacttaaaataataacatttattttgggaatatacaaaccagacaatgaactagatgttttatacatactattactcactttagcctcataatactttagggataggttaagtagcttgcctaaggtcacaacactattacattcaaaagccaggattcaggccgggcttggtggctctcaactgtaatcccaacactgtgaggccgaggctggtggatagcttaagcccaggagtttgagaccagcctgggcaacatggtgaaactctgtctctactaaaaatagaaaaattagctaggcatagtggagcacacctctactcccagctactcaggtggctcaggtgggagaatcacctgagcctgggaggcggaggttgcagtgagcagagatcacatcactgcaccccagcctcagccacagagtaagaccctgtctcaaaaaataaaaaattaaaattaaaaagccaggatttaaaccaaggtatgtcatacataaaatcattttttgctaaaacactcttttttttttttttttgagacagagtttcgctcttgttgcccaggctggagtgcaatggcgcaatctcagctcactgcaacctctgcctcccgggttcaagcaattctcctgcctcagcctcccaagtagctgggattacaggtatgcaccaccacacccggctaattttgtatttttagtagagacagggtttctccatactgaggctggtctcgaactcctgacctcaggtgatccgcccacctcggcctcccaaagcgctgggattacagacatgagccaccgcgcccggcctaaaacactcttaagtgtgggctgcaaaggaaatattttcagtttacttggcaaacattaatattctctcttgaatacagcttttaaatgttaaggaatgagaaagaagaacgtacttgaaaagaatattactgaaaaatgcagtgagatgtctggaagaaacatgcaatggctgtgtgcctactatgtgccacatgctgtgctggctatattaaaaacttcaacacagccgggtgcagtggttcacacctgtaatcccagcactttgggaggcctaggcaggcagatcacgaggtcaggagatcgagaccatcctagctaacacggtgaaaccccatctctactaaaaatagaaaaaatcagccgggcgtggtggcgggcgcctgtattcccagctacttgggaggctgaggcaggagaatggcatgaacctgggaggcggagcttgcagtgagccgagaccatgccactgcactccagcctgggcgacagagcaagactctgtctcaaataaataaataaataaataaataaataaataaataaataataaataaataaaaacctcaacacttcactgttacagcagccttgggagggaaatattggtaatctcttttacatatgaagaaactgaaacgtagagaaaccttcaaggttacagaagttgcaagggacagagttggaactggaaatcaaattcagctcattaatacctatcactagtgcttactagggggcatttcaaatagaatattagaaatctcatcaaatacaactcaaaccaacctattttttctttgctcagggagttgttgtgaaaactgagaaatccctatagatttttcttccaatagccttattttaaataattatccacacttaggttatatatgttaagtactgcccataaactccaaaagttgattgctatgaaaaccaaacaggcatccagtagtaaatgtgaaaatataagcaattctgtcctatatacatgattttttttttttttgagacagagtcttgcactgttgcccaggctggagtgcagtggtgcgatcttggctcactgcaacctccgtctcccgggttcaagtgattctcctgcctcagcctcccaagtagttgggactacccgagtagttgggactacaggtgcgtgccaccatggctagctgatttttatatttttagtagagatggggtttctccatgttagccaggatggtctcgatctcttgatctcgtgatccacccgcctcagcctccaaagtgctgggattacaggcgtgagccaccggcacccggccctatacacatgattttgaacatactgacagatggagaaaaccactttggaaaagatacttcacatgttctagagacgatttaaaccattaagcattctatgaagcttctgaaggtctgtcagattttaaatgacaacagtgaaattttaaaacaagaacaggagaagtcagcaccaaagctactttaacattaataataagtgagccaataaataggtctatgtttgcccaggcaggttttgcttattatgtcagttggaaagccagaaggaaactggttttaactcttaatataacctgtatcatgacaccatcactttaccagaaatgtagctgatgtcagcataagactgagacagtttacatttaaaactgttgtttcctttccaactattttcataattcattcatggtataggattgagactatttccttaaacagaaaaaaatgggtaattaacattgagaactttccatgtgccagatactgtatgaactgtcttaattttcatagccaccctgcaagatattatcctcatctttttagaggaagaaacaagtttcaagaaacgaagtaggttttgtaaggccacagctatagtaaagaggtggagctgacattcaagcttggatatgaattattataatttccacagcactacacagctgtcattttctctacctgcaaaactaaataaatactgctaaaaataaaagatgatctccaagatctctaaacattaaaattttacaataaactggttgaggtgacacatgcctatattttcagctactcaggagtttgagactggcctggacaacatagcaagaccctgtctctaaatttaaaaaacaaattacagtaagataatcttagaccagagaaaggaaagtgaaatagctatttggattataaactgttttagtaactcaaatgtaatgtgtggtggtgacaatatctttgattcctgggaaggtcattgtgaaagggaatagaaaatgccttgaagtcaaaatataaggctctcaaatagaaaaataaatataacatttaagtattgtcaacagagaaccaagttagaaaaaactagttatagtctgaaacaatgctgtttaaaagactgtagtcaccagtgtaaactgactcaggcaacacttcccagggtccatgccgtggacaactgactaatctctctataaatactaaaagataataaggttccataaccaaacaagatggggaaatgctggatttaatgtcaagcctgtttccatactggttataggcttgagaatcctatggagcaagtctttctggatttgaatcccagctcttccattccagcttagccgtgtgacttaaattgagatagttgctgtaaagactggaaacaataatgcatgtgggagccttagaacagagccttagacagtgctcaataaatgttaaatcattaatagtaacatcatttcccagagcctttattaatctaagttgaggttcattgtgaattaccaacgggatagagtttgcagtttctcaaacttattggatgatggaacccactttttcatagaatatccctcgagaaaactggttaatgtctttaaaacaaacaaaactcttcgaaacaatagagaattccatcaccaaaataaaatgttgttttttgttttttttgggttttttgagacagggtttccctctgttgcccaggttggagcgcagtggcacaatcacagctcactgcagcctcaacttcctgggctcaagagatcctcccacctcagcctctcaagtagctgggactacaggtgcatgccaccatacctgactaattttttgtattttttgtagaaacaaggttttgccatgttgcccaggctggtttcaaactcctgggctcaagccagctgcccacctcggcctcccaaagtgctgggattataggcgtgagccaccacacccagcctaaaacgtttttaaaaactgaatttttcttcactaaattttccttacctcttatctgctaccacctgcctttgagcaaaagttcttttttgtttgagactgagtttcactcttgttgcccaggctggagtgcaatggtgcaatctcggctcaccgaaacttccacctcccaggttcaagcgattctcctgcctcagcctcccgagtagctgggattacaggcatgcaccaccatgcccagctaattttgtatttttaatagggatggagtttctcaatgttggtcaggctggtctcaaactcccgacctcaggtgatctgcccacctcggcctcccaaagtgctgggattacaggcatgagccaccttgcccggccgcagctaaagttctaacagatgacactctctgatgttcactaaagacttgggaacgttgtctctacttcataaacccactccatagctggatcctgtattctgtcatacccagcaactgctcctcccgttcaatcttcatttccactatccagtcttgaacaccaaccacttcatgtcccagcagccaccttctggtttcatttgttccctattcagcctagactcaatggcccatcacttcaaacactctcgctactgaaatatcttgcctccttaccctctctgtcacactgacacataaaacccaggccaagaccaatccaactgttcaattgtgtgctcacccaggctgctgagccctgagagaaggaggaaatcattcatacaaatatatataccacagccgtgaaaaatccatgattccattttttctaagtattcccactcagcttgccctctcacttccctcagaggctttcttgaaattctccttttctcctcagtcccctacaatcatcatttcatccccactataatctcagtggatgaccttatccccccttcactgaaaaaaataaagtgttgatatccagaattctcacttgccacccaaacacttccccatctgcaccatctattgttcctttattcctacttcagtggaaactgtattctcatctgtactgcaacccagtatcttcactccattcccactaacctcaaagacaatgtacaatcattcacacacacctcctttattctacatcttcaacttctcccttcctttttcctttttccatttagcatataaacatgctgaagtctctctcatctaaacacagcctgcccctctacctactatcttgtatctccctatgagcaaagcttcaaaaagagcaaagctttctgaaaagaatgtttgcacttactgtctccactctcaacaaatatccacgcttagtcctcagcaacctggcatttatttctatcatggagactccactgaagctgttctacagaaggtggcaatcagctgcttaactccaaaatcaagggacacttcccggtcctcatattcattcaactgtgggctacatttgacattgcagatggctcttaaaatttttgtcttcatttaataaatatttactgaaagctactttgttgataagaacttcagataaaatgatgaacatgacacagtcacaagccctcaagaagcttaaagtttctatgataattcctactcctccttccacctctcagatcactccttccttctctactcaacctttagagctgatattcccccatgactcctttctttgctcttctcacatccatcccaggattaacgtgtttacattacctattcattgatgttgacgaaatttttatcactagcttagaatccttgacctttcatcctcctcaaactgtctagtctcaattttttgtcctcttccaagtaaaactttcagaaaactatctttgcacactccacttcctcatatccaattcacgttttaacccatgacaatctgaacgttttaacccatgacaacccactacactgaaactcctcttacaacgtcaccactacctcatgatgttaaaatggacgtgcttatcattattcaagctttcagggcattctcaacagaactgacccactccactatctaacctgtacatgtgaaatttggcacagctgtatactggaccctactctatttcccatactctatccctaggtgttcctacccattcccattgttttaaatatgacttatgctgggcgcagtagctcacacctgtaatccaaacactttgggaggccgaggcaggaggatcacctaaagtcgggagttcgagaccagcctggccagcatggtgaaacccccgtctctactaaaaatacaaaaattagctgggcatggtggcccacgcctgtaataccagctactctggaggctgaggtaggagaatcacttgaccccggaggcggaggttgcagtgagccaagatcgcaccactgcactccagcctgggcgacagagcgagactctgtctcaaaataaataaataaataaatatgacttataactctggtccacatctttcctgagctctagcttcatttactcaactctccacttggaaaccccatttggacaaactcaatttatccaaaatgtccttaattttcccactaagtctcttccagaactactggagttattaaagccagaaacaaagagccacacgtgactacttacttttcctcgcctctcatatcaaactatctccaaaatatattttggctattcagttatcttcaactcactactatgtcataatatagctattgttatttcttccctagagtactgactggttttttgtttgtttgtttttgtttttttgagactgagtcttgctctgtcgcccaggctggagtgcagtggcgcagtctcggctcactgcaacctctacctcccgagttcaagtgattctcctgcctcaatctcctgagtagctgggattacaggcacccaccaccatgcctgcctaatctttgtatttttagtagataaggggtttcaccatgtcggccaggctggtctcgaactcctaacctcagatgatctacctgccttggcctcccaaagtgctgggattataggcgtgagccactgcacacgggcttgactgactttctaaccaagttcaccaatgtcaccttgtccctaccaatccagtctccaggagaaagctaaagtgatctttataaatataatataaaatcactactcagacttttggctaagatcaagtgtaaatataatataaatataaattgaaacacatcactcactatttaaaacccttcaattgatatgctggtaatctaattttaaggtagaacagagtattctctttcccacaacagaatgttgctccaattctctggcaactcattctgtgggtcagtggcattcaactacttcagtacaaagacaagcataagacacagaagttaactgggttaactaaaggttactaaacctttaccaaaccttactaaaggttactaattatttaattccaaagcaaataccataatttatcttttttttttcaagacagtctcgttctgttgaccaggctggagggcagtggtgtgaccttggctcactgcaacctctacctcctggattcaaataattctcgtgcctcagcctccccagtagctgggatgacaggcatgtaccaacacgcccagccaatttttgtttttttaatagagatgggttttcaccatgttggccaggctgttctcgaactcctggcctcaagtgatccactcgcctcggcctcccaaagcctgggattacaggcttcagccactgcactcggcctatacttttttttaattgagataaaattcacatagcatacaatttaccatttcaaagtatacaattcagtagttttagcgtattcacattttgcaaccatctacactaattccagaacatttctatcacctaaaaagaaccccatacctattaacagtcattcccaattgcctccctccccatctcctagaaaccattgatctcttttctatctctatggatttcctgttctaaacatttcatataagtgggatcataccatatgtgatctttcgtggcttctttcactcagcataatgtttttaaggtttatccatgttgcagcatgaatctgtacttcactccttcttgtggctgaataatactccattgtatggatggaccacatactggtttttgtttttgttttgttttgttttttgagacaaagtttcgctcttattgaccaggctggagtgcaatggcatgatctcggctcactgcaacctctacctcccaggttcaagcgattctcctgcctcagcctcccaagtagctggaattacaggcataagccaccatgttcggctaattttgtatttttagtagagatggggtttctccatgttggtcaggctggtcttaaacttccaacctcaggtgatccacctgcctcggccttccaaagcgctgggatttcaggtgtgtgccaccacacccagctggaccacgtattgtttatccattcatcagctgatctacatttaggttgttcccactcttttacaattatgaatattgttgctattaacactcatgtacaagtatttgtatggacatatgttgtcatttctcttgggatgacctaggaatggaactgctgtgtcatatggcaactgtatgtttaactttttgaggaactgccagactgtttcccatagcatctgtatcattttacatctctataagtaaggaacccttatagggttcccatttctccacatcctcaccaacagttgttggggttttgttttttgggttttttttttttttgagattttttttaagttattatagtcattctagtgggtgtgaattggtatctctattattattattattatcattattattttagagacagggtcttgctctgccgcccaggctggagtgcagtggcaccatcactgctcactgcagcctcgacggcacaggctcaagcagatcctcccacctcagcttctcgactagctggaactacaggcacaaaccacgcctatctccctatgttgcccaggctggtctctaacttctgggctcaagtgatcttcctgactcagtctctcaaagtgctgggattataggcaatgagccaccacacctggcctcactgtgatttttatttgcatttccctaatgaataatgatttcaacaccttttcatgtgtgtatttcatgtgtttatttggccatttgcacattttctttggagaaatatctcttcaaattctttgccctttttttttttttgagacggagtctcgctctgtcgcccaggctggagtgcagtggtgcgatctccactcactgcaactgcagcctcctgggtttaaaccattctcctgcctcagcctcccgagtagctgggactacaggcacccgccactacacccagctaatttttttctatttttagtagagacggggtttcaccatgttagccaggatggtctcgatctcctgacctcgtgatccgcccaccttggcctcccaaagtgctgggattacaggcgtgagccaccacacctggcctgcccattgtttcaattggattatttgcttttttcttatggagctgtgatagttctttacatattctaaatactagacccttaacagatacacaatttgcaaatatttaatcccattctgtaggttgtcttttcactttcttaatgatgtcctttgaaacatagaagtttttaattttggccaggtgcagtggctcacacctgtaatcccagcactttgggaggccaaggcaggcaggttgcttgagcccaggaattcaagaccagtctaggcaacatggtgaaaccccacttctttctttctttttttttttttttttgagacagacttgccctgtcaaccaggctggggtgcagtggcatggtctcagctcactacaacctccacctcccagactcaagagattctcgtgcctcagcctctcaagtagttgggattacaggcgcgtgccaccatgcccagctaatttttgtatttgtagtagagaggggatttcaccatgttggccagactggtctcgaactcctgacctcaagtgatccatctactttggcctcccaaagtgttgggattacaggagtgagcactgtgcctggccccaattcctataatacaaaaaatacaaaacttactgggatgtggtggcacatgcctacagtcccagctactcagaaggctgaggtgggaggaccgctcgagtctagagaggttgaaactgcagtgagccatgatggcgccactgtactccagcctgggcaacatgatgagaccctgtctcaaaaaaataaaaactttaaaaaaatttttttaattttaagggccaggcgcagtggctgatgcctgtaatcccagcacgttgggaggccacggtgggcagatcacgaggtcaggagttcgagaccagcctggccaatatggtgaaaccccatctcttctaataatacaaaaattagccgggcgtggtggtgcgtgcctgtagtcccagctacttgggagactgagacaggagaatcgcttgaacccaggaggcagaggttgcagtgaaccaagatggcaccactgactccagcctgggcaacagagcaagactccatttcaccaaaaaaaaaaatttaattttaataaagtccaatttatctatttgctgtttttgaaactgcatttatgaggagattttggggacaagggttaaatggtgacagaatagtgtcctttgtgaggatgtgaaatggaataattcggataaataaatagggtttatgtatcattgattactaattcttgctacagtatgatgagggcaataacatgtttgaaaatttaaccttaaagttttgctaattccagtagtagcaaaatatttatatagccctaaataaattttgaggaatcaaaggagtgatacataataagtgaatacatataaaatgttgattgcaaacaaaggaaagatgattgagagaatataatttgtcagggcattttatttgcaggacataataaaactggacaataatatctatctcatacagtccttgtattagatatattaatcttataaagtacatgaaagaatgcttagcacatagtatttgctatatgagtattatttattatcagtagtattcttattaagtatctagatttagagctaccctgaggctctactgaatatagtacgtaagaaatttctcattgtaacttcctcttttctgttttgcacacatttcttgtaggattacctgaagaaatattctcagtattgttccacatcaagatggccactagtagcactgagcttatatcttactagctaagctactttttcagaaaatgaacactgttttcctcaataattccaacaaaatttctagttaagtttctcattagactaggttggatcatgatcgtattacaaaataaaacatatggttaatggggtagcatctttattttgggcaggttgagacatattatgaccactgcccatgatgattaggtccattgttctcacatggtgtgaactagaagtgaaagagaggtagaacttcaaaaaagattgaaatgctgctacagaagaaaaagaaaatactgaggtctctgtaaccacagatatttatgttataagaaatcaatacagattaaaaattaggtaaaaaaattgatttactaataatcttgatctttagccacatttctctgaaataaatttgctatgatgccgtgatggggatcagcaagctacgttttccaagttccttcaagtgggatcctgctacgttctgctattgggaggtactagagaaacataggcaagagaatggaagaatagatctccttttcctgtttgtttgccgtccttgctgatattctcccaagaacatccccttgccctaggagcagtaattgtttcagtttaccaattttttcagagccccagaaagtgcctcttcagaggtaacagcagcagttggaacatatctctccctcagaggtctagcctcagctcaggaaggcttttactctgagtttacaaattttaataactccagtctcttccctttattcatctaagcttctgaggaagtccgtatgtggccacgagatggtggtgatagcttcatcttgcagtcattttctttgctttccacagtgttgttacttttttctcctatttcctatgtggtcaaattttaatattaactcatagtcatagtgtagtattcatactttatgtgaaatgaaatgttttttataatgtagccatggcctaccaatagcatattttcttttagatttcgcaatatatattatatatattttgcttcagtgactttatatgcttttttgttgcccacattagttttttatatacaaaacatccaatattaccctggtcccatcatttcttctgatatccattgtcctgtgatttctcctggaaagtgaattgtttatctgtccatttcactctgtgaagtcatacaggtctatctatatagaactcctgtgctccaatttattccttgtgtgaaactgggcaattttttaatctcggaatatgtttcttcatatgcaaatcagagataacacttacctcacaacattgtttagagcattaaaagaaatataatatgatatcattcacacagaatttccctgggtgtgaattgaacaatgtcagtatttctcccatttaatgtgaaaacaaactatataaataaacaaaaaaaagtataaaagaagaaaaaatatcaataaaaattattataaaatgtatacatattaaaatattatcaagagtcctatacaaattgagtttttcaaaaataataaggattgtaacttttatattgcagttaatgcaagaagcattatgaaagagaatcacatgtctagagcaaagtgatgttaatagtgtttatgtttgagccagatggaactcctcataggagcacacagtgctcatctcctcccaactttgcattcaaagaaatcatattcgtaagccaaaattggtcatagaggaaatattcaacaccactaaattaagcaaactaaaaatacagcagtttttctcagtgaactggttgttaaatacatactaaatcaccgctaggtggcataggccctcataaatggcaaaataaaaatgggactgcttagtttctattttgttactttctttatttctgaagagaatgagttcaaattttaacagcagagaaaaaaatatagttatgagagaatcagactttcaagtatgtggggctattttagggaaggacatagatgttctaaatttatcctagccaagaaaaaaaatgtgcttggttggttacagatgaaaatcattaaaatcctcccataggattattgatcagtctaaaccaagggtccatttttttttaaagggtcatattgtaaaaatgttggtctttattggcctgtttctgtctcaactaacaaactctgctgcattagtgtaaaagtagccatagacaaataatgtaaatgtaaatgaataaatataattgtgttctaataaaattttatttgtatatcaaaatttaaattttagcatgtcataagttattatttgggttttttcaatgagtaaaaaatgtataatctacatttagtttgcttgctctactaagtgaggtgggggccagattcagcttgaggagagtagctagctatctcttagtgtaaacaatatatattatttagtattcttttgaagtgatcaacttggttataatcatggtaagctggcaagtgagttgtaagataaggactatattagttaaggttctccagagaaacagaaccataaatgagatagataactaagacagatgtagacatagaggtagagatagagatagagacagatgagataaagatacagatgatacagatatagatgacacagagatacagatacttttacagatgaaatagatagagaaagagacagagatagctagaagaagataattcttgggaggaattggctcacaaggatgtcgagactgagaaattccacaatctcctgcctgcatgatggaggcccaggaaagttagtgatatagttcaacctaagcccaaaagtctgagaaccaggtgttccaatatcagaggataagagaagatggatgtcccagctcaagaagacagattaaattcgcccttcctctgcctttttgttttatttgggctctgaatagattgaaggatgcccatagatattggtgaggatgatcctcttcactcagtctacctattcaaatgctaatttctctggaaacacagacatactcagaaataatgttttatcagccatgtgggcaacccttagcccagtaaaactgacacatgaagttactcatcacagggaggtctgggacaattcacgtctttgttaatttaaatagacacatgaagaaattattttttctcttttcttcttctttctctttctttttctttctttgtctttctctttctctttctttttatttttaactaaaggacattttgtaagcacatgaaaccagagaattgcagtagccatatgactactatgaggtgagaaaaaggaaagtttttgcatcctgcagatctgccccatctatggtctttgtgttaactgagacgacaaatacgttactacctaagcttcctttagtaacgtctcccactacctttatgttaaaacattttaaaagataaaattaaaggtacaaaattttgttcttttagagtggaataaagtgggctttcataagctcagatgtgaattttacaatgattctggtcaaatttttcagataattttagaaaattgtctaaaaatactctaaatctagtgttaattattagacattattttttcaaatgttattaatattatagtgttagatgaagaaagtataatcactagggatgagtttaatttctttaagaaagacagatatcaggatcctctaataatacattaaatgcccactaaagtcagaggtatgtatttgacatgtaccttactatattcttgtggacaagaaggagcaatatggattaggtaatggaataatttggtaaattatttaatggttaattgatatacttacatattactaacaaaatggttttaacctgaaaatttcatttttgtttatattctggtaacattatcatcagtgttttagacatgttcatctgtcaaacacatgaaaaatgaaacaactctaaggattagctaataggttgaatgataaaataaaaacctatatagatgtctgtgcattacaattatgaaacagcttttagttaataaaactaaataggaaagacccttaaatattacatatttaacaataaaccacacacacgtaatgacaatactaggatgagagacatacgttttaaaaagcaagattttactacaacaagcagtgtttagctagctatactgtcaaccaagggttggcaaattatggcctgcaggccatatccagccaatagactgcaataaattaaattttattgcagcatggacacactcattcatttgcgtattgtctataaatgctttctcactgcaacagcagagttgaacagttgtatagagattatatggcccacaaaacctaaaatcttagcctctttccctttacagtaaaggtttattaatcctgcctaaaaacaaatttagcggaataatttggttacaggaaaataatgatttttctcttataagtttaatgtctggacaaggttaatgagagctatgtttttctccaggtagagtatcctggacgtgcagtttttatgcatattttaacttgaagacactaaagagtgttcaaatgtaggatatacaaatgacatagtgatttaaaatagtagtgtcaactgtggctaacaaaactaggaccatgcttttcctaaaaaatggaggaaaatggcaagataggatagttttggcacataaattgcatcacatttttgagagtgtcatttgaaggcatggtttagtctaatcttggtttatctcaaatgtaagttcagtaacatggatgttacagcaagacataatttgactctaaatcagcaagtacttgcaaatattcagaactatctggaagtgaaaacggcttcctctgtagacagacagcaagtttcttatcccagagccctgtaggtagaccatctgtgcaggttataatcaggagattcatgaatgtgataatgatgacatagtcacattgacaatgaggcttttagtcatacagattaaagtaaatatatactctattgtgcaaatctcctagtaattgaaaataaatttaatcttgtgctacaagtagatacaaagtattcccagttagattttacatgtatacattttgaaactattaattttttaaaaataatgcaatgactttttaaaaagttttattgattgattgattgattgattgattgatttttatggagtctcgctctgtcaccgagtttcgagtgcagtggtgtgatctcggctcactgcaacctctgcctctggggttcaagcggttctcctgcctcagcctcccgagtagctgggaccacaggcatgtacaaccatgcccggctaatttttgtatttttagtggagacagggtttcaccatgttggccaggcaggtcttgaactcctgacctcaggtgatctgcatgcctcagcctcccaaagtgctgggattacaggcgtgagccactgcgcccagccaattttctcatttttgatacactaattctaaagtaaactttcccctttattacttgaagatttatttcaggtgtttttcaattcttcctaatttcagctcctcaattgaaatttggttcacattaatgatgcttatctgttcttgacacatagaaaatacaaatataggacttttactgaattctattttttaaaagttctaaggaaaaagctattacatccacatatatgtgtaaaatgaaacgtagacctaagagctactgtgaataaacagcttgacttttaataaaagagagtatattaaatttatgttacagctaagaatctgggaattcttgagtactgtctgctaggaacactattatgtcaaaaataacaaaaggggttatttgacatgatttgctgatcactaaccccactgagggaagccctccaaggtttatgtgagaagtagtcagtttgtttttgtcttactggtgcagaagaaatgctttttattgcccatgttctccaaggatgacactgagctccacaaagcaaccactggggaatatcagataactagcatgaatctattgttataaaacaagcacgctgttttaaaaacatatttaaagtaattcatgagttggatgtttcttgacaggtatacttttcagtttaggtatttaaaaagaaaaagtctgctgtgtacctttattttcacttttactttggttgttttttttgttttgttttttgagacagagttttgctcttgttgcccaggctggagtgcaatggcacgatctcggctcactgcaacctccacctcccaggttcaagcaattcttctgcctcagcctcccgagtagctgggattacaggcatgcaccaccatgcccggctaattttttgtgcttttagtagagacggggtttctccatgttgaggctggtcttgaactcctgacctcaggtgatctgcccgcctcggcctcccaaagtgctgggattacaggcatgagtgaccgcgcccggctactttggtgttttgatgtctatagaaatgagcagtttctctacttctttcccagaaatttatctccaatgctgacataagcacaaagaccttatgtactgtgctgggaaatattttgtgtcttaagaataaaaattttcattagagttagtccatgcatcacacatattatccttcctgataagaggaacactgaagcacagacactgtgttgggctatagttcttaatggaaaaattaagcttttcaaaatgttagtcactgccatgctagatgtttaagtcatttttacaacctgttttgatagattctaagaatcagtcttacattatattttctgtggcttactgttaaaatcttattcataaaaataacggttgtgcatagaagtagtatataccaacatcataaaccagaaagtaatttatatttaaccctcataacaatacttcaaagtagaaattacctcatattgtagaggaaacacaggctcagataggatataaattgcccatatcacaaaattagtaagtgatggagctagaatacaaacaagatctgcctatttacacaaatcaataatttttcctctatagcatgttgtcattacatgcctttggttttcaggtgaaatgcactcaacttcacattttaaaatatgccacaaatgtacccataaagtaagtgaacatgactattgagtgggatcacaattattaaaaagtttgccttgggaacaaagacagtatactgaccgtcagggaactgaattccataaccaaaggggacatgtgccatctccctgggctcaatggggttttcccaatggattctttgtaaataggtgttgcacatatttctgtttctttaagctttcctttataacttccagacctacttctgatggtgttgaatttctttcaaaacctcaccctagatatggggtcagctttaggcaaaactgagagttgctagctaacaaaagtagctaatattttaatgaaaagtcttattattaagctaaatgccaaacgctattcattacatgtattaatcaattatcacaattttatgaagtagatatgaccatcatttttatttatcagttgaagaaactaagacacagaaaactcaaataccttacccaaagtcatattgcttgtggagaagttggcaattcatcttggttatcttgacttagagtctgcgtgctggatgactattttagactgttacgtgtgcatgcagagctcagtgtttgtctggtcccactccctcctacccttctgtcccctagtgacttcatcctgttccctacttctcaagactactccttttcttagacactttttcatatttcagaactaatcattctgtttattttttctctgctcatcatgccaaagttagcagggcagctgaaataaaggaattcatactaaaaaatggcatgctcaatttgtaaaattttccagagttaaatagatagagtgaaatgcgcaatttcttctttgaagaaaacaatgttgaattttacttaaatgaatgataaatataattttgacatgtatttgtgatctgtatgagtaatatcatatcctatcctgcttcacattctcacactcttataccattaatgatctctacatctatccccaatcagctaccacctctcttcctcagctgtgttatgtcaggtctgaaaattaaattttaaaagtagttcctaagttttcaacattcttaaagtttttttcctggaaggacatgatgagtaacctgactgtcagcaaatgccttaggtattaaggagaacaatcataatggcaatagctaatattttttggcagagccaagtttcagtatctctttgcaactctgtgacatcatgatcatattaattcttattacaaacctatgaagtggctatccactttattttaattttataagggaaaaaacaagtccttagagagtctaagtaacttggctctggatttgaacttcaatctagctatctctataacttgacctttaaacattataccaccttatatgtcaaacttaccttgaaaaccaacaagtaaaccaactaaataaaacaataagaacaacctataataaaaagccttctcagctgggtgcagtggcttacacctgtaatcccagaattttgggatgatgagggaggaggatggtgtgaacccaggagattgagaccaacctaggcaacacagtgaaaccctgtctctacaaaaaaaaaaaaaaaatacaaaaattatataggtggacatggtggtgctcacctgtagtcccagctactcgggaggctgaggtcgaaggatttcttgagcccaggaggcagaggctgcagtgagtcgagataatgccactgcactccagcctcagcaacagagtagaaaccatttctgaaaaaagaaaaagaaaaggacttattatccaattcagtatgttctataacaataaaaaaaataccattgaatgaatggggaagaaaattagatcaactgctgtgaagtaaacttgtttactcctgatcaagaagtagcagcagattatacctctgtggtattagtaaaatacatctttgcgctaggcgcggtggctcatgcctgtaatcccagcactttgggaggccgaggcgggcggatcacgaggtcaggagatcgagaccatcctggcgaacacggtgaaaccccgtctctactaaaaacacacacaaaaaattagccgggcgcggtggcgggcgcctatagtcccagctactagggaggccgaggcaggagaatggcgtgaacccgggaggcgaagcttgcagtgagcggagatggcgccactgcactccggcctgggcgaaagagctagactccgtctcaaaaaaaaaaaaaaaataataataataataattagccgggcgtggtagcaggcgcctgtggtcccagctgctcgggaggctgaggcaggagaatggtgtgaacccgggaggcggagcttgcagtgagcggagagatagcgccactgcactccagcctgggcgacagagcgagactcggtctcaaaaaaagaaaaagaaaaaaaacaaaaacaaaaaactaaattctggcagctggggtaaaattaatataagaaaagaatagatacagcactcatttttctataccccaagtgttttaattatttctatatttggaaatgaattcataatatattagtcacattatttgaaatttcaaattataattttatttgtttcagataaaagcctcgtcctttaaaaacatacgtttggatgaataaacaaagcaagctttctatgactttcatataaactactttctcatcctgtattgctccattgagttagtgaggtcagggttttgatagaatgagaatattcatacagtgaattgcagacatatttgcaggtttttaaaaatgatgttggctttgtctagggctgagggtgatgttgcagggcaagtgtaaaggacagagtcacacagagactcctgagaactagaaagcaaccagtgagtgccagcatctgaagggcaaggaagtgtcaacgtagttccgtataaatttagtaaaacataaggcaagcacccaattgttttccaacacaatatgctaattggagtggcagaattgtatggtagaaagaacatacaaatgacaaatatattcacaacactgtgccaagtgcagtgagaggtacagtgacataaagacatgcattttcagacattatagtcggtttgaggatttaatatattaatcatgtacagagatctaaaatttccttgagtacgtattatgcatgctgaatggtaggaaatgtgtgctaagtattttattctggattctctcaaataaaactgacctcatagctctgagttaagtaattttatatttaccacataagaaaattgaagtacaaatgaggaaatcgaggtacagacagattaagcaacttgtccaagactatacagctgctacgcagagcatcagggattcaaatctaggaatgagtgaagaattttattactaattgcataagtaattacatacgtctaagccagtcatatattctttgttggttctatgacccaatattgcagaaaataattatagaattggattttctgtttgagtacaaaatttgcttcacaaaattataattctgttgtttaaatattgaatgtatagtgtgaattgttatctaatagtagtatctgttttaaagtcacatattggtaaacattgccttaataatgattatggttgtcagcacatgttatatcaacgaatcctttcaaataattaatgtggtaagtgtagaccaaatcaactgataattagctaagcctcagaggatctgagtactgtatctatatttacatggccagtgagtagagaggttgagtcttaatcccagtgatctgacagcagtgatctcatttgtgtgtatgattccagaatcactgtgagagaatgtgaacccatatttagacaatgcatagttcccagcaactactagagtcttatcttgctctgggagtgcagaaaatacattatgataacttggtaatattgtaatgtgaaaagcgtaaagagaataactcacaagaaaaatattaagaagttttctgaagcacacttctgttgtggcttccagattaatgtgctttcaaattctaagcagtgttttccacagacagattttctgtgtaagcagaaattggcttaatttaaggagatacaaaggatgttacagtattttgtgtttactacagagattggctgccatttgttagtgcagtaaaattttgtaaagctgctcctcatgagattctttgaaattcatttataacaacgagactggatacttaacatctgctgcaaatgttttctaggagacttagttactcctgttccctactttctgtagtttatttccattctatgattgtttatcttttgaaataatttcaacaattgactctgtttaatttgtctggttctgagaaaacattagctagatgacaaatttaacagtttaatccaacaggccttgagtggtatatatcggcatgtgttaccaaaggagtcaagaaattaactccagctcttaaacattgaaaaaagaaaaagaaggtaggggagggaatcttgatagccactttggtaatgacgcaaagtgagagaaaatatcatcctggagctcaacggtgagcacacttaatggcaaaagaagtgagaactgaccatctgctcatccacatggtgagatatggacaaatacctcttcttgagaatgaatgagtggctatatgaatgaataggtgaatgagcaaatgaaggcctatctgtgaataaccaaactggaaacccacagtcagtttacaagcctcttgaggatatgatcataacttgaatatctcactgagagctaaccctttatatgaacttagctcatttacttttgcatttgttgttgaaggtccttcgtaccctgctcaaaggctgaattcttaaaaatatactaccaccattaaaaaagaacacaagaaaatttttggaggtgaataagtatgttcagtaccttggttgtgatgatgatattggtccaaactcatccaggtgaatatatgaaaggtgtacaatttttttatacctcaataaaacttctaaaaaatgatttaaaactaaacaggaacaacagcaaaacacttaggaaacaacagaagtttctgtccctgttctaaatgttaactttaaaggtttgattaggaatttattttttagtgcagaaacatgattttctttttcaaaacacaaacagatctagttaaaatctacacatttcccttcataaaggcagagaccctcatgcaacaatcatctttagaaatagaggtccctgtaaaaccacagtgcatggttttttgactgtttatgcattaacagcatttttttgtttctagccttggaaatacatcagaaatagatctcctgactgtgtttgcatgggtcccttagaaatgacttaaatataagcaaaccatattacttaaacaatgttaagctatgctgtagcgctgtattactgctttgagaaattcatattgttcaactaaatattgtaacagtaattcatgttcatagaaaagtcaatcaaaggttttcacaagttcgaggcaggaaaggaaataaaggtcaggcattgtattgcaagttccctattctaaattgtagttcttacaaataggctcctgaggttccatagctttagcaggactcttacatatgccttcattgtctcttctttcaatgacattcagacatttatttctttctccctcccattgtgtctgactgcctcacactgttgaacttgtgcctctctcacctcttccttctgtctctctttttaataccttgatgcggctgcaacggatggtgggatgcattttattcagctctcaaggcagtcagagttccacttgagttcatgtagcatctgttataacagggttaaaattatagaaagtacatgattttattccctttagctgaaggacaacaaaggtggatttccgtatttccttgtaaagtgctgcttccgagaaagcacattttggtatccactaatcccaagtaaagtgacttggttcctaatgttggttttgccattagcctggtggttttgttaggttatttattttctttaagcccatcaacccttcagttagtctccattctgcctacttgttggtgaaatttaaaaggcctcctagtagctccaatagttacagtataatagaaacaagcaaatactcgttttaaaaaaaattctatgagggtaaaaacacttggattcaaaagtgagtttgaacaatatctaccaagtggtaattaggtatgctcagacttttaaactaaaaatacaccacaagactactgcacactcctactaaggtcccaaggattattgaaaagtagaaagaaaaaaaaatagtgggaacttcttttagttaaaatgcacatcttatcagtattactataataatagtaattgtgacctttagtttgaatttcttttctggaaatataaagtcttagggaattgtgatataaatcccaaggctaaaataggtgtccactgatcattctgatttttatttgataatagtcttcctaaatagactattattcttataaaatggaaggagcaagttggaaagcttaagaaaactctgaagagcaggcatttctaaataggaagctataggagaaaaggcttatgactatccaaagcacttaggcatctggtgtattatatggaatgtctttctctttttcctcaattatcagaacaagttcaatggtattaaaacaataaaaaatggtcttagttggattaaataggccttcaaagggctctctgacagatacgctcatgaaattatgacataactctgcaaactgaatctatgtgaaacagaaaacatgtagaagacacaaaattctaagggaaactcaaggattttctaagattgctttacataactgcttctgttttccaaactttaccttctctaacaacaagccatgatataccagcgtcaaagtctagatagtccaatggcaagaatgctgacaaaggtagttgtataagaatgagtcatattttgaatgacaaaatggttaatatcttctttcttgcttttttatattggcaattttttctatgttttagaggaattgagaattagaaggttatttatgagcgtaagagtataggcaaatttaactcaattcattaaatagttattgaatctgcaaaacattgtggaggatatagaaaattgttacaatatgcatcttatcctcaaggagcgtaatcgttttatttcagctggagttttttaccacttagatggagcttagctttactgaatgtagaccttaaacactctttatgccgagttttattagcttgggtttatcgtatggccgctgtggctggcacaaaatttaccaaccataaatattagtatagtttagtcatactttcacttattacttaaaatttatcactgctttttcccatgggggtgtggttgagcaaagtgttttgagctgcgtttatgcgtgcttgatacctgctcccttcgatccaggtgatctggagggcattctcactggggcggggatgcttgcatgtgtaattttttactaagaattcaaaaaacaggccaggaccaaacttctatgtttaccgggttgtgcggacccatctaggcattttcagtgccttgctttaaataattaagctacattaactgggtgaaaaacatttgagtggtattttgaaatactagggggatgtcagggggtaggatcttgttaggtataaatctaaagtggtcctttacagtcctggaagtttagggcctttaaaaaagttgaactagcagaggttttcgctgaggggccatttgtagttgaagttatatttgatttaggactataatatctgggatacaagcttttcagagcgggatacctgaagtattatataagtattaggacagagatttagttagcatcgaaataggagattttatttggttggagaatgttaggattttttagaaaattacgttaatcgaggggctagggttggagtgttcatggttaaattatgatttttagggctctgactaggttcaatttaagtatcttgtttttgggggctggcttacctaatttaacaataaactcagagatggggggagggcagatctgcggatttaatcggaagcactcctttaaatactgcgtgaacgtacgtgtgtgtgtgaacgtacgggtgtgtgagaacgtacgtgtgcgtgaacgtacatgtgtgcgtgaatgtgtattgattattatggccttcaagcatgaatgaattagcaccttatggtttggtatgttggctcagaatattcaagataagtccagctacagtcgattccgcagggatcaggctcccgccgtggtaagtggcagcatcccgaaaacaaaaacataccaaatgcatgacagtgctcccatgactagttattagggtgatagtcactagtacattgagatataaggtttgcaaatattttctcccagtttgtaggttgcctctccaccctccaccctcctgtttcctttgctctgcacaaggtttataattctaagtaatcctgtttatctatttttgcctttattgcctctgtttttgcgtacaaactaaatcctcaaaaacctgtattatcatagttataagatttattttggtaagattccaaatagtttaaaatgcttttgtttgtttgtttgacataatggcatcagatataacatggcataatgtcataccgttactctttcacttaaaaatcgaaatgtaaacatttttaaatatggcaaaaatgtacattagaaatacattaaatggtaaataacaaactgctgttaatcccacatataatcatggcttacttttataatactttgaacattataaagtgattttctatctcttattatattttataataacatgtgggatagctggagtagatattattttctctgccttacatgtgccaaaaacgagagagggagagaagtgaagtgactttccccatattgcaaagacacaatggtgcagagctgaaactttactgattatttgaaatactttacaatttttctaaaacatagtgagatctaggttcttagtgttataaccagccctatttgaaaatttctcaggatattggttcatcctttattaaaacaaacaaacaaaagtaggatcaagttaagaaaagcagaatgttttggtaggattaggatctcaaaataattatctgaagccaataaagtgtcacattatttttcttgctttatttttaattctattatttttcctgtgtctatatggtgatataataacctgagaaagacggttctaatcacacatgtactaatcacaaccactcaacataattttaaagtaaaatttaacccggatgtaaatttaaaagttcttaaaagtattcaacttctgtgtctatacttaagactccatccctaggtgtccgttgattatgcaagtaggattaacaataattaatttatcaacctaatctttaagcagtgcaagcattattattagactttcttaaatgggcactataatatgtatcttgattgagcttacttatttcatagaagaatggtatttctaaaattcttttagagatttttgatattcaatctcaaatgtttaatatattttccaaaattatcaaataaggatgagcactagcatactctaatatttacaggaaaaatataaacaaaaacacttggatttctaggttctttaataatctcaatgccaggatgaattctctaagtctgaaaaaattgccatgacttggtactaagatcagtatcaattcaaccattatttatttaaaaaaaataacttaaataaaagttgcatttaccattttgtgcagtggttctcaaccctggttattcctctatagttttaaaaaatgctgatacctgggtccttggcccagtgattcagcataaattagtctcacatgtggctttgtcatcaggagcttaaacagttttccagtttatattaatgtgcagctgaatttgagaacaactgctttagtcttttgaaatgaggccaggtgtacatataaggccttactgtgcaaagatttaaatttgggggacattttggtcatataaagctggttaatacagatgaagtttaaaagaaatagactcttacttaccagatatactaacactttgcaggaatcaagatcattttgagagaattaaaaagaagagaaaaataaacttcctgaatcctgaatttataattacatgttctacctttctcgtactataccatcttgattgatgcttagaataaaattccaaagaatctgaaacagcatacaaaattatatttgtatgattttcatgttcaacatatttcagtgaatttcaatgattaaaaattaattatccataggtgatatatatgattattccattgccaagactgttacattaagtaaggcagctagttcccaacagatctggaaatcaatgttgcaatctgaagaaggcttttaaagtcaatattcttaggtacatatataattttgttataatctccatattattgcaattcaattctacagaagacctttcttgtcacatcaccagtccagtgacactggtagagtgtatcaaaggaaatgtgaattgtcctcttaaacttccaaaccaaataatagagtgaattgatttatatttcaaccttgagtacggaagacattaacaattatgatccatagtaaaaatcctgtttttatgcagtataatttattgagactcatttaaaattcacataacatttgattgtatggaaggtgtttacaattgtaatttttgcaacattgaaaatgccaaatgtgtttgattaatatcaacttcctgcagccacacctgtgtaatatttatgcctctaaattactatttgtggtaattagcagtttttccattgcaattaacaagcttcaatctcgaacattgtctgagatagcttaactttttacttttttcttagttgaaatgttttaattatagtttaatttgttattttagttttccttttgtcttcttggagtttaacctcaataacattttgagttggttcttatttatttgcatcaaaccactctaaaatgtaatacaaattattatcactccagctacatggaaaaactttaacaaacctgtgaatgacttaatcattttaacaattaagacatttacacacacacacatttcttctaaaaagaatggttaaaactacctatatactggaaacatattttcatataactttgcttattattatttgtatttatattgcataaattatgtcagtagctagaatgacatggatttgacaagaatagagaaaaggtggtttcatatcccagactcttaaaacacacttttcagtttaggacacaagcgctctgaagatatgtatatagtcttcatgtctggcatctaattcctatgagtttccttcaattaatactaaacacatgtatagaaattgccataaactgagctgtatgatggtaataatccccaaatgacaattcaatcatccagatctttgggttgtcctaattccattatacaaggtggatctaatggtcattagatccctagatatgagggatccctagaaaagtattttcttaatcttggataatagttttcaatgctttagtgaaaattgcttatggaactcttcgattttaatcaatctttgaaaatggctctttcaatggttgataaggtaagtcatcacacagtacttctatattgtaaaaaaaaagctaaaacagtaatcttaatatacattaggtattaaatacctcttatttccagatgtatacaatagattccttttatatcttagagttaaaaccagagaaaaaaattgtctgtctccataaaccatgcactctcttttgttagataaagaaaaaagtgtaattcatctttatcttctctgatctattatgtgacttttaattttgattttaaaaattgaacttattgatttttttcttgatacataaattatacatgttcagtgtctatagcgtacattaaaaattgtttaaaatacgtataatctcagcaaacagaaaatttatttttttatttaaaatattacctaacattttaattttcctaaatatcaaaactgtcttattagcatacactctcaaaataaattttattctatcttctttaataacataccagtttttcctttatatgtattttgaacatatatttgcttcactaaatgctattttaaaagcatggatttcatttgttagtattccataactagcaattataaagttggacatttagatttatttcagttttcaatattcacttctaaagaaaggttacaatgaatatttctgtaattaagtctaaccacacatgcaagattatttctttagaatacattttagaagtagtattagattaaggcatttggcttacagttttaaaatccctttagaaaatgttctgttattataatggtctatttttgtatgccttgtattataatttgtatcaaatatatttttatatgcatggtatatataagaaatgcaaatctaattagataaagcaacaaatatattacataattgtgagatatagtctttaaagttaatatatctgagaagtctcctttttcttttaatcttcacaaatgttttttcttttgttcactctagaagattttgatgtattggttttgaatgaccaggattatttcagaaggattaaactaataaaatattataggcaacaagagcagtgaggtgctgagaggcatgtaaaactgtgagcctatagcatttaatggaaagactgacagaagggagctaaaaatatatattttcggtaccagagcctacttttacaactaataatgctgaacacagcaaacttgaacctatttaaataattaaaaagccttaaatatgaatattgtcaatactaatgttgattttaaatagaattcaaacataattgagaatttgcttgacaaattatacaacctgcatctttactatattgaacacatttatgttgaagtattgtgattataaaaatgtttatcttgaatatataattttcttctcttgtataacatgtataatgtatgtagtaccattcatattagtatgtttcttccttgttaacaatacaaaaaaggtacgtatatgattaagtctttttctttaagagaacattcagaaagcctaaaaataaattttaagtgaaacactagcaaaactttgacctttattaaaattgtacttctgtccccacttgaacctggttctgtagtttagattctgattttatttgtcgaaagggatgcctatgtactcaatgcaagtgacataacatccttcattcaataagaatacaaatgcatgaataaatacatatctattgcaaataaaataaaaataggagagcagataattattgaggtataagttttttactaaagtacaacactctctagtcataagagcagaaatatatttaccagtatagcatgttaataatgggtatttataaatgctgccaaccatatttttaatcaacttaaaaatacatttggtagaacttaagtttagctgcataaatgagagtaatgaacttagttacagatttttggacacatttgccactttaattaaaaagattagtaatcgtaacatttaatgctgctttatattttcaaaaggattagttcaataatgattataaatttccctggcatctttgcaattatcatcatcctcaaatttatagatgagggaattttcagaagaaagttaagtactaggaatagattttgaatccagtgggtttcagttacaagactgttacaagagtatgagtttataaatagtttccaagtgccaataaatgccagtggtggagataaacagaaaaaggtgattttatcacacctgatttaatgctgtttttcttttatatttcaacagtcagtggaatcttggcagtaacaaaaagagaaacaaaatttacattgttaacagtaccgatagagtgacactctttatcacagtttgagagaaacttcaagaagtaaaaataggagatgtagtctacagacacttaagaaattcacattatgccagaaagactaagtagccattcccctagaaattgaagaaaaatagaaactgggtttgattaaatgacagtatgagtgctacatataagacattttctagcctttcagagaaggaagttaagagtacatgaaaagattattactgttcctgtttgcctttgaagattacagaggagtacagtcagcatgcagagacaatattgttgtgacttacagttttaacaatgaattctattgctagaatttccttttttaaatgttttctataagagaattcttacagttctgattattatttccagcaagaaccttagaaccttatgtttctgttaggttcttcttaatcacgtacactacgaggagatggagggaatttcgttattctattctaaaacatacccccttccaatttaaaaatggaacgtttttaaatggaaaatggaaaataataaaatggtcagtcatctaaaccatgattaatggattctctagaacttagcttcttctcttccttcctctgattaccttcctttgcgcatgtcacagctcctgatgaacatagacaatagataagacaattaaccacattaatgtttcaaaacactttattatttgtttaaaattacagtttgaagctaagttggggaaccagatgccacttttacaagggtaaataataaatggtgtgttttaattatgtatgtggcccaattatcatgagtaataagtgaagcaatatttttaaaggttaaagaagttctgtatatattagagtggagaaactttaacgttctaaaactgaataaaatctttccttaagaagaaagattttgtattcaattaaatattataattagttacaatatatgggatatctgtcggaaaaaattgagtaatctactttctcaaagttttatttaaggatatttctttccacattaggtagttcacagataatagtggttttgttttcacagtctttcttgtcaaatcaaaattcatacagcaattcatgtgaaaaaagtgattgactatccttttacaatttacttgataaaatctaagtagccaagaattcaagcctagaagactctgaccaatattatcctttatgctaagaaataatattccaaacctatttcttaggctattaactgccatttgaccctttataagctgttatgtttcaatttattcaaataacatataattgtccaataagtttgcattgcctcagtaccagatctataaaaggttaatgggctttaaaaagggaagaaatcttctgcaacaacacggatgaacctgggagactttacgtcaagtgaaataagccaggcacttaaaaacaactatgacataatctcacttatatagagagtttagataagtaaaactcatagaaacagacagttaattggtagtcatcagaagctagggcatggggaaattgcagagatgtcggtcaaaagacacacaattccagttagccaggaggagtaagttcaaaaaattgattgcacatcatggtggctacggcgaataacaatacatttatatttgaaaattgccaatagagtagattttaagtattctcaccacacacacaaaatatagtaagtaggtgaagatgttgtagaggcccaaattcgggctcatgtacctgatgctcagttgaaaccaaacactgacacaccaatgcttggggatagataaaagtttattccatttggccaaagtgagaacggggcaagatctctcagacatgtcttaacaataagacgaagcagagggggccgggtgcggtggctcacgcctgtaatcccagcactttgggagaccgaggcgggcggattacgaggtcaggagatggagaccatcccggctaacacggtgaaaccccgtctctactaaaaatacaaaaaattagccaggcatggtggcgggcgcctgtagtcccagctactagggaggctgaggcaggagaatggcgtgaacctgggaggcggaggttgcagtgagccgagatcgcgccactgcactgcagcctgggccacagagcgagactccgtctcaaaaaaaaaaaaaaaaaaaaaaaaaaatgcagagaggatatttttgcagctagacagtaagagagggggagttttagggaaccaaggggaaagtctgtgtttctttaatctctgataatatcctgagcaaccagacttctgggcctcagcagttagttgcaacatccttataggcattcattccttctgcaaatgtttttttgttaccttaaagttatcttctcctggttgacaaagaaatagtaaatcagcagtttgcaattgtattgtgagaacaagggatgttggcttttatgcaagcaagcaagggcctaattcgaatttttgttatctcaatcactaaaaatgctgaggtattgacacctcaaggggtccgattacaaggtaatgcatataatgcgtatgtttagcttgatttagccattccacaatgtatgtatactttaagacatcatgtggtacaccttaaatatatacaatttattttcagttaaaaaataaataattcaaaggaaaaaacattaattggaagactcacaaagatgagataacagggaatgataaagaagaggaaaaatgtcaatatagtttcaaataatgaaacataaaaaatggaatcaacagtggtgctttttgatatgatcttgaaagttagcaaaggaaaaaaaatacatgaacaatctagatttataaatattgatctagagacacagcagaaaatagttcagaatatgtttgaatataagagaatattgttaaatatcagtttggaaactttatttggaaaatattaaagtatactgaatagttcaatacttcataacaaaatttctctagaagaaaaatatagacagaaagcagccaaaaactagtatttgaaccttttgaagtatcattacaactaatgttttgtgtactattttgtttttggaaatgctgggcctaagaagaatcagaggagaaacatatgaagcctttttacttcttttttttttttttttttttttgagatggagtctcactctgtctcccaggctggagtggcagtggcgcgatctcggctcactgcaagctctgcctcctgggttcacgccattctcctgcctcagcctcccgagtagctgggactacaggcgcctgccaccatgcccggctaattttttttttttgtatttttagtagagaccgggtttcaccatgttagccaggatggtctcgatctcctgacctcgcgatccgcccttctcagcctcccaaagtgctggaatcacaggcatcagccactgcgcccggccacctttttacttttaagtcaggtgagaaaaaaatctgccttttactttgtcacgggtcccaaagaggacgagaatttaaaaaaaaaaaaaagaagggagacctgatcatcagagcatatacagtgttgtgaaggcagatgtagtaaaatatattatctaaaaaaggactgaagaaactgaaatgcaacctgctaatgaagataggtatggaaaagagatatgaaataagtgcttttggacaagaagatcacaataaaaggatttctgtgaaaagactaaaaacacaaagtcaaataaaatacatcacagaatgtaaataatagacaccagctgcatgggttttaagactttgttgaaggaaaaatataaaactataattaagaatgagattctagaaaaataagaaacatacagacattcagcaatatctaatggtttaatttcacagaaaaaaattaggcatttattagaaagtgtatttataaggaaaccatagaatgagaagaatccttgaccctcctcaactttaacaattatgatacatcaaattcacttttgatggcagaagtgatgatatatttttttaaagtaacctagcctaaagtacgtccttaaccactatcatttagacaattttttacaagcccttgcgttgtgtacagtagcaagctcataagtggaaacattgggcatttagaagcaaactggtgatatggaattttattctctttttttctgtttttattctaaacaaaattttacttctacctcctactaagaaagatctccttatattcatttcctatatggtttggtatatgaataaagggtgataacaaatataaactaaaagatgggtaaatttttacatacactttcatagcatttatagagtaagaaaaataaaggaaagcaaaaaaactacaaacaaaacaattgagaagtgaaagtcaagggctttgactcagaggagcagaatgctggggtgagaatcctcatgacatatgaaaagaaggaacccagtacacacagtagacaattggcaattgagaaaaggagaaacatctccatggaaacagtacagaatgattctttccttgaccttgcgagaaagaaatctaccgtaattttgtcagactaagtaaggatttctgtggccatataaaaatgtgtaatgcaatataagaaagtactttcctcacatgtagttaaagatggatgattgttctgataaaaaatatgcttacagctaaacttgctgccacagtttaggaaaataaatgccaggcactagactaaaccaaggtgctcatgccatccctggcaaatagtaagctcacagtcatctcaaataactgcaagattaatagatgtttcaggaaacaataggtaagtaaattagagaaatggataaatgtgtaaagcttctatgctagtttatgagtgttttagcttagagagtgttaggtcaggtcagtctgtcaggtacttctcacaattgaaactgtataaaattaaaatactcagatttcagatttcagaaaaaaatgtgtacagtgagatgtgatgtacagaataaaatccttccatttgaaggaatatataatgaggatacctagaaaatggtctggaaagaatgttaataaattgatgctactcttttatttgactactgcaggtcagggagcatggatcatctgtgagcatgtctacaaggaggacaaagcgggtagtactatggggtctcttgcatgtaccatgcacactatagtctatgtgaatgctgcttcccagaatcatgtagtgtacaatcttccctttggcaatgggatgggtaatggttatgatgtgaagcaaactttttctttataacctatacattttttttgtttttgcagcaagatttttttcagataccaattttataatgagtgagaatgataatgagggacagaactaccaggtaaatattcccccacgtcttgttgttgtataacatagacatcctgaattagttttaaaaagaatgatgatttttttttcttctcacaacgctattattttaaggaggaaggcatgtgaagactttgtatatagagtcaataagaagattttaaacacgtgcatgtaaacttggccgacaagaggcacttggatctagagagactggcaacatatagcagaactttagcatagcctagagctctgttacagaaattatgagctgggagaagagacaatggtgagctgatggaagtcagagcagccaggttaattaattaggactctcaataaacactagaacaaaaataaagaagacagtaatccgctagaacaaaatggaaaccaaggagtcactacccacccatagacccaataacaatagatgacaatgtttgataagaaaattagaagcaggagagaaattagcattttatgaaagaggttgtagtcagttggacagatggatgtttaattcttgaatcctctatttacacatgctagtgtatcttcctctctggatctgtttccatataagggatataataattattatttcatacagacattttgttgtgttgttgatacatttgtgtgaggtacatgaataatgtatctaagtgtcttgcacaaatcctggcacataaatgttcattaaatgatgggtctctaccaacatccaatatgaaaaaatatttccatttcccaggggcttcagaagatgagtatgaactcatcttagagttgaagaatgtatcagacaggaacaggtcagaaaaagatcccaatctatgtatgtcatgtatttagggactcagaaggagacttatctcatgattagatggtgtgcatgggcaaagaaaggaaaaaaaatgctgctattttcataaaggctgaaaatgcaataattatgggaaagttgctaacaatgattttagatgcttgtcaaacctaaacaggaggtcaccagaaaaatgctctaaatctcttcactgtgacatccacatctaacactcatgcccttatttagcataattttacctggagctctattgtcctgagatcctagaaaatgtagtgtctaggtttctcccttgtaatttaaacaatacttcagaagttagaagacatgagtggataacaggaaacctgttacaggatacaacttgattaatatagatataataaataatggtgcttcctaacctcagttaggataataaataatacatgttccagttaaataataaatgttgtagtctttattacttgaatttcttacaagacatttaaagttcatgaagacagatagtagatctgtgtattttaatcattttttaagcgtccagaacttcagttaatcaaatcagtaaatatttcttttcttaaaatgaaacaatctgcacatatacaactccactctgaagaaaggcaattattttcataattataggaatttctgcataattatgtaaataattgcctttcttgagagtggaattgtatatgtgcagattgtttcattaaaaaaatgtatttattataattaaaaaaggctttatatatacataaagcctttaaggccttttgttttttttaaaaaagaagactgtccctccaaaagtggcacgtagttctacctgttgtataatcaacactttactaatttatggatttaatccactgcttatccccaagatttccgagatcccaagtccaatatagtcaaggctcaagatcaaagtacttacactttaccctcactacaccccttgccttttatactccaccaaataccacctcccagaagttgctgtaaaaagaataatttacctacatacatgaccattaggattctgccttgaagcagacatgcaggaaaatataatattccatcccatggcaacttttctttacttgttttgttgtaatatttttgtgtaccctaagaaatagtcattttaatagattttcaattatagactaatatttatcagggattcattataaaatatgctatgaatttccttgatggtgggagcagatagagaggaatatatggttccatctcttgaacctcctctgtgctctcttatctcaagtttatttcatcagtcaattaatctgcttctgttactgtgtctctagctccccctgcctttccctgtctctcaagcactgtggtttattattccttatcactctaataataaatgccagaagctatgtttcctcactaagacatatcctgggaagtcaataaatacacgttaagaagacaagatttctcaactttgttaagatacagatttctatcattaacaattctgatttagcaaacatttattcacccccaatctttctaacttagtttatctcccagaattctgcggccacaatttggtgtgtgaataactgattgaacttgcaacaggtggtgaatcattaatggcaatgtcaaggcttaaatcttgctccactggttcacccatggctgctctcacataccaagctagagttcaattagaaagttggagatcagtaactccagaacactggccagagggtcagaagagctgactcgtggacattctcattgtgggtaaaggattcattgggtttaatagcagtttatgtcattcttttctaaaaattagcagtaccagtagtctcatgatttaggtaaatttgctgttgattggggtagaatagtagaagtatattaataaaaatgccttttaaaaattacagagtattctttgcactgctgaagtgattcatgaatgagaaattttgaattactacacattaatattttttctagctctcatacctgtataagtctcagaaaggacagaagtgaacagagatgagaatgcaaccctctcttagcaaatgatcaagcgattgtgtattgttcaatgattaattgatattttaaaatgtttccaggaagactaaaacactttttgagaattatgttcttaattttatactcacagctactaaagcaagagggcttcttagtaacaaattatttttacagtaatcaaagaaaggttaaaataagagagtaagatacctaaggccacatggagagtaaatgtcatagctggaaatttggcaatggttttgtgattctcatcattttctattttgttttattttgtcttgtaatacagacttctctgaattattttatttctgacagagagtaatattagactaggcctttatttttacaaagcgtatgatttgtattgtttactaaataggtagataaataagtatggaccaaaataatgagcagttatcataaatgtttacatatatagaaaattgttttttaatggataacctatataaaataactttttaataaacatgtatggttcaagaaggacattttaaattaaatgttcaatgccattttaagaatttgattctctaaagaatatccacaaaatttgataccacattaaaaaaaagatgccaaataaatatatctagaatcctctagaatttatttattgacgaaatcataaggaaaagaattttcatatgtaatttattaaatgataagtgacttgtcatttcatttacttgggaaatagcataataaagtttttaggaggttttcctctagctggtaatttttgacaattaaaaaacttgacccagttttgaaaaatatttgaaaatacttgaccctgcccaaaagccacctgcaaatagcttatttgcatgaacattaaacacaagggctttcatgttccttttacttattactgggataacaaacctccattcattaagcacagcatcgtttttgttgtgaatgaaaaatcagccaactttctgccacatctggctgctaatctataagttttgaataaacagtagacagtcaattgccggcatccattctcttaaaccacatgaagttttttttttctccccagtcaaaatgccatttaatacaatttcatttcatttttcagaacaaccaaggctttaaaaatagatcaggttttatggtgcagggcgcaaagcatgtattagataatctaaggataaatctgttcatatactaagtctctcagtgtccaattgccgataaaagttcaaatagtcactgcagacaggataatttcactgtatcaaaaactggcatttgcattgaaaagtcatttctactcatttttgagaaaccagtagcaaagttattaattttataaaaaacctagactcaatctcagtgaagatcttaatgggttttttgctgggcaaaaagatgagggcagtttaactgcgatagctacaaaacatggcatataaaacatttatttaattgaaaaataacagctacagcatccataaaattcaaagcccagcattagcattttttcccactggttctaaatgaaccccatcctccttactttaaaccttcagaacagttgcctatagatagagttattagtcagacatttgggaatatctttcagtgtagccatatgaaaatctaccagagcacacataagaaaagtcgttcggtaatggaacagacagctatgcctcattaaaatgcttcaccagataaactataacaagactatttgttctcataatttgttacttttattaatgaagcctcccaatatgatgcccctcccttttttattagcagcaatatcaaattttgtcctcagatttatgcatatttgggttcatttcttaactttcttaaacttcaagtttatttaggcccctgtttcaactaacattttgctgaatccttatacatatttatgctatgtattattcccagctttaaaattcccgtttttaaattgatattaactcctcttctaaaccattttttctatatgtaatttatatgtatatatatgacatggatacagaatttccttttgtctcaaatttttgtttattccctattaaatgatgagtatccctaaattatagaagaacagttaagtctttgcaggttttaataaaaagtagccagaccagttctgtaactaaaaccttcactgacctcaattacctgtactcttatgtaaagagaggactagacattctaagaattatcatatagaaagtgaattagttacctaagtgagagtgcttttaattattttctcttttgtaaggagaactaaacttgcttccaaacaggaagagagctcaaaaagactgggagcaatttcaagaaggaaagaatgggatatccctctccttctggcactcagcattgcacccatcctgcaatggaaccatacatgatgagacagttttgggaaagtttgataggtgtcctcaagagtttcaagatgaagctaaacatggccagttgttgcctgcttcttgctttcaaaattctgaaggctacatgctcattgaggcagcttttgatggcaagatggagaaagagaaaagatgccagattcttcttcccactttagatgagtgaatatgctaaatataggccaagtccgtgccacagaagatgtaagaggcttcagatacccactggcaagtgtttgcaagaagtcagcaggagaacaaattacacaggttaacaaataggtagcacagagttacaaagaatttacagattcactcccgacagaagcagcatttgggtgcctgcctctcaatagaaaaagatcagattattaaaaaaaaaaaaaagcttctctcttttcttttaattcttcctgctacaattcttgttttccccgttacaatccgaagggacccataaacagcacttcaaatgtgtcatgtcaccctctcctggctgtaaggtttccactgaaaagtctgctgccagatatactgaagctccattgtatgttatgtgtttgtttgttctcttggtgcttttgggatactctctttttccttgacctttgggagtttgattatcaaaagactcaatgcctattggctctgagatgattgcttgttttctgggactcaattataaggaagcaaagaagggaggtctgggcataccgacatgcttacctgccatgcagatgcaactaaggaaaagctcccagatttaccaagtaaaagtacaagttgcccattgaatttaaatttcatataaatcatgaataatgtttagtatatgtaattcctaaatatttcatgggatatactcatagtaaacaatgtaaattcagctgggcatggtgtgctttatttgacaactttgaactgagtcttcagccaatcctactgggcctctttcagagttgtcccaaattgatgcaaagcagttgcatgtttgtataactacattagccagccatgggtcaatggctgctctctgaaaggaggcaccactttgggcgagttagttcattttagtttgtcttaggacaatatttagtgaaaggtacaggtgtgaatggtcagctgctgatgttccccatgagtgtgggatcgatgtcttcccatgaagatggggtctggatgatgaaccacagtgtctagtacaataatttctcttatgtgagcttcaagagtgatattgagttaatgtttctatatcctacttttttgttttgttgttttgttatgactttgttctcttaacaattaattttccaccttagtgtttcttatactgaggaattgtagctacttttactacagaggaatgctgaggaattgtagctacacatgacgattgcaatttcaaggaaagggaatttatgctgaaatatttgaataacttcccctcttagtttttactatgtcaaaaaaattcatataaatgtatccctttacacaatggtctactgaaatttttggtgaaactaaaacacagtattgccttttttactgtaaaagagaaaaaattaaatagatttatgtacagagacacctattacaaaaaatatttttaaatgaccctacactgtatttgcataaaagacttaatttgtcatttccttagaaatgagaggttaggggccaggctcggtggctcatgcctgtaatcccagcactttgggaggctgaggcgggcggagttcgagactagcctgaccaacatggagaaaccccgtctctactaaaaatacaaaattagctggacgtggtggcacatacccgtaatcccagctactcgggaggctgaggcaggagaatcacttgaacccgggaggcagaggttgtgatgagccgagatcatgccattgcactccagcctaggcaacaagagtgcaactctgtctcaaaaaaaaaagaaaaaagaaaagaaaagaaaagaaaggataagtctgaagaaataaggagaaataagataacttgcttgagaaagaaacatacacaaacttgatagctatggagtatactagataatccataatacgaacactcaggtttgaggagattctatatagcagaaaaggcctatcttcacaaaactgctaatttgataggaagtctaaccttatctttatatggttgttaatgttaaagcatggaacttttaaaggaccttttattttgtcaaacatttacttaagcaaagcacactgctcagtgcctggcactttaaaatactcaacaaatattgcttttattgttccttttttttatactcatgggaaaactgctattttaaataatctgtaattgtttactatgtatttgcaagttaaagtatctaaatgtagatagattttggtaattgaagataaaataatagccctgaaacaggaaaagtgaatgtaaagttgatgtcttccagggctagagaggtatgatataagacagtaggggctgcgtaaaagtggagactgtgtattcaacataaagatattcaaattcactttgaaaaaataatcgaattttcaggtagccagacttgagttgagacaagcagtggatctgaaaggccatgagagaagtgtggaaatgttatagtgtaaaacaggggtcccaacccctgggccacaaactggtaccgggcctgttaggaactgggccacacagcagaatgggagaggtggatgagtgagcattactcctgagctcagcctcctatcagatcattggcagcatttgattctcacagaagcaccagctctactgtgaactgcgcatgcaagtgatctagtttgatccttatgagaatctagtgcttgatgatctgagtagtggagcagttttatcccaaaaccttccccccaaccctgtccatggaaatattgtcttccacgaaacgaatccctggtaccaaagaggttggggaccactggagtaaacaaaattaaggcagtattaaatacgaagatgtcttagatgttattttcttgcaagagacagaatcttatttaaatttccttagtaaaacagaggtttaactaaaaggatacaaaaatatcttgggctcagagtaaataagaaatcattagatagctgtttgttttatatctagttccaagtctgcatggtttctagttcccattcatctgtttatcatcttctccaatacagattaatttggaaggctgttagtatttgctccctttaacttaagtttatccatggctttggactgctgcgacaattctggcccaatgctattagacttctcagttgagatgcctataattaacatactaaaatacctcattttctaaatcaaaattttgagaaaaagcttcatgtattatatgcttctccttgagttacacatccattcctacttttctgaactgtaaccagaaagaacggtcatggggcacaaataggattgggtttaaactctctgctttatcacaatgccagactgatatttagagcctctacatgtggaaaagcttatgacactccttcattgtacagttcaaaacaaaattattttgaatctgtaaaaaaaatacatactgaatctaaacagccaattctagtttacaaagttctggataagaccattgtcttagtccattttctgttgcttatagcagtatacctaaaactgagtaatttacaaagaactgaatttattttctacagctaaggaggcttggaaatccaaggtcgatggggcatatcttttgagagccttcttgcttgtggggactctcagaagagtcccaaggtagcacagggtatcgtatggcaagagggctgagtatgctaacatgctagctcaggtctatcttccccttcttataaatctaatggtttccctcccaagataacctattaatccactgacttatcgatggattaatccactcatgagggaagaactttcatgatccaatcccctctttaaaaagctcgttctctatattgtcatattttggattaagtttcaacatgagttttggggggaacattcaaaccatagcaaccatgaaagctgaacctttccaattctgtgcatggatgtttatatctgatatcctaattgctgaagcacagtttcaacctgcctgttgaaaaagtccatttgcaacccagcacaagtcgatcacttgctcgagctaaatctcattttgtctctcaaacatttttcccaaattcatgtcatccctctgctaacaaagagaacaaaggtttgtagatgtttcctctcccaaagatagggtgaataactgctttaggcagagaagatcaaagtgtgaccttattgagcacttttattggcttcagactagggtttcaacaagttcagactcctgtggctgcctcaccatgtctaaagaaattatgaatgatccatctccttagtgtgattccccacccacccactccaatccagcccttctctctacctcttttcaaatatttctctaagacttttcttagaccaatatgacttccctctcacctaacaccctttctttagcaagttatatttatgtcagattcttaatccattcaaagggaatgatgataaagaataaaagaataatactaagtattaaactgtgccatcttgcccttctctctccctgagaatttttgctaatttagtagccaggggaaatgattgcaatatctcctagtgatctggtggcagggggagcatctggtttgggtgagtcagtccctgactttgtaatatgacctggtgaataactcaatatcaataaatttcaacctgctgcaggttgctgaagttttatagaaacttagaagagctataagccaccaccataaatttgagaagcaaccttaggctcagagaaaaaactggctgttatctagctgtgaaacaaaacacataataattatatagtgaaacaggacttcaaaagagaacttaggcaaatgagatttatgttcaacatttttgtggttaattattccatgttgctgcttaataaattttctaatttttaagaaatacaattcaaaaatgaaagttttgattatattgtagggtattagcacatgttcagaattttcagaattggagttctctgctgccctaactgacaatgacaaaatcaagggtagaaacttaagcttatgcttatttcataatgctggtcaaattcaattaaaattagtaatgtaatctttgagtggttactttatatttgtgttctcaagcagggacaattttacttttcaggggatagttgtcaatgtctagaagcctttgtgattgtcaaaacttggagaggaggaggtacactactggccagagacactgctaagcatcctatagccccctctgcattaaataattgtctgacccaaaatgtcatagtgccaatgttgagaagctgtgctctacattcttcttattcctttattaaatcattattatgtgtgaagtgactgttacataactagtagtaaacaatattttattgaccacttatcacgtgccatgctctattctaagaactacatacattcattctatttatcctcactatactacaaaatagggtaggctataattccattttacagatgaggaaattgaagcacagaagaggtaacatccacaatcacatagcctgcagaagatagatctggatttatagtcaggtaatttggttttagaagcccatccactgtggtaaaggaaatcaagtgctgcttattatttcccttgactttctcctatgctcttgcaactctaagaaaaggaccttggcaaatctcaatctacagaataattcataattctgggagctccacagaaaataaaagttatttatttatttatttatttatagctgttgcagtgttctgccacaggtatagtcaactttgtctgcaaagttaaaatttttaaaatgaaagaattaacaattcctcccctaattatatatatatataaataaatgtaggccttaacattaacacaaatcattgaagtttcatgggtcaaaaatttaggcagatatgtagttagtaggcatcttatactaattagttaacatactacttcttttatttttattataatataaactatattcattttataatatacataaataaaaatcaaatgctaaatataataaagtttattttatatagtccagctcgctaatgtacattaatgcttcaatgataatattaaagtttcttttattttattacatttagatgcaaactccagccagggttcacatattgatttcacgttctagtaaaaactacaaataaaaaactataaagtcagagattatttcttaatatattgcatatactttcatccaatgtaagtcatttcatgacatgtttagctttttttgtcatagtggtctcatgttttaatggaaaatagtatgcaacaattttgctctgttttagatgtgatattgaagtttaaaacttcactaataattgctgcaaatataacacaacaagagaaagcactataatctattgaggcaaaacataatattaagtaactgaaaatggcagaaaactatagggtatgataacaatgcaacatgaaaagcaaagagctttatttgtggtattccaggttgagggagacattcaaatgcctattaattcctatctctaccaatgatcacatttatatggttctgtactggcatgttccctgaagtctactcgtgccccattagtggtaaaagaattaaatatttaaaaatatttacgcatattatatttattagaaaaaaatactgacttccatttatgttgagaatgtcagcaaatccaatcaactcttctcagtatttccttttttctttatttgttgctataaccagagtccaagccaacatcatttcttgcttataaatgtgcaattatttcctactatctccctttgctttcatttctgctactttatgttctattctccccagagtaatcaaagggatctcttaagaacttgtcaaatcatgtcactcctctccttaaagcaactcatgccgcgcattcatttagaccatacccaaacaccctagtgtgacctgccccatgaatcatattcagacctcatcatttgtatctgtactcccaattcacttttcttgagtgaaataatcttttttgttgttgttcctcaatcatcgtgagctctttcttgcctaaggacatttatactagctctttctttttctggaaacatctttttcccaaatattgtggctaattctgctggaggttttcagcttaaatgacatctccttggcatttctcatgaagtaaaatacaagctccacaagacaaggctgcaggggaagttaggaagggactacttttttggttttgcattctttgaaataaagcattatgggcaacatattaacaaaataaaatataaaaggaataccataaatcttcattttacattttttcctacaattattttctatatacctaccatctgtcattttctatctatttgctaaaaatttctcagcatttccatgtaagcaacatgcatattaactgggttgaatcctctgtgtcagattctattttataatccagagtgtttcacttgcaccttttacttccttaaagtcctaagataaacagttgcaaagagtcagactctttgaagctctaaacatacttctgctctctccgtcctaatagccaaaggagggcttttctgcattttctctattcaagttccttttgcttttcctaagctttgtagtaaaaatctgcactcatgttctgccatctgcttttagtatatttttaattcacccaccaattgccattttactgattatccccagaaggataaagccatttttagtaaaattctgctttaaggggaattgatagttgtggagaaataactgcacattgttgaagagtatttattagaacacagttccattgtatttgaggagagaaatgcattactgactgcaatgtcttgagtcaagaatttagcaagtttttggaaaagactttcataaggtggaacaggaatccacattaagttcttgaacacataagattgagttgagcaaatcaatcagagtttgacaaagtaaagcgatgaatctagttaaggtaatgaaataaattaatcccacttgcctcatataagggtttgaaagcagaaataaatgcaaataaaggaattagaggtagagttacacgtagaattgctggctctataatggagaaaagtcaagaagaatttgagataaatttatttgttggacaaaatactacttacaaaagagttggagttggatttgagttgttaatatataggtgtgaatgtgtgtgtgtatatgtatgtatatatgtatatgtacatgtggattctagaggtctagaacttaaattgtttggacaaaggatatggatttttaccaagtgtttatttaattgcattctaacaaaataatattcttataagtgtatgagaaagaccttctcccctatatttacttggaagattaccaattgtattgacctttcctaatttaatagataaaataactacaataataaaatttttattgatgtacttacagattaaacagttttcatattttttatgtttttgtaaattgtctctcatagctattgccactcctcacctttttaaatgtttattaatttgtaaaaattctcttaaggacatccacctttgaagtaaatgttgcaaatatttcccaatgcatattattgtcttttagctttgtttataatgaatttttacatttttaactataagactcacaaatatttgttgcatcaaacttatttatgatttccacgttggtcatttttcaataggccttctcacccccaaattattattattttaataatggtctttaaaaatatcaaataatatatgtattagctattaagtacagttagacttttttactaatataataaaaatttgcaaaatgataaataataaagtaatggatgattgtacaatgttatgccaattttccataatgttgttctaatattgtaatttgctttctgtcatacagaatgtaattttacttacggtacaaattttaggtaagagtagattcgagtgaatgaaggctggatgaacagtgatactgtacctaaacacaggttctgtgcattttaagaatcattgcagacatttgaatactggcaaatctttgttatatttaaataaaattaatatatctataaatttagcttatattttttcttttatttttatttatacacatatgtatataatatgactacaaacagtcaaaataatataaccaattcccacatacacaccatttagtacaaaggataaacattatctgtaccattcaagtactctgtgcaccctgtcttaattgattttaccttcttccccctcaaaatattatcttgattttctctaacctgttgtcttaaacaggtcttgaaaaaactgtggctgggcacactggtacacctgcaattccagctactcagaaagctaagccagattgcttcaggccagtagtttgaagacaaaaagtgctgtgaaaaatgttggctaggcaaagggatttgggaatactagggaaaatgttagactgctaaatgggtggttctgacaggcttcattcatttttaacttttaagttcaggggtacaagtgcaggttcattacataggtaaacttgtatcatggtggtttgttgtacagattatttcatcaccccagtattaagcctagtaaccactagttattcttttgtatcttctccctcctccaattctccaccctccaaaaggccccagtgtgtgttgtcccccactctatgtgtccgtgtgttctcatcatttagctcccacctatgagtgagaacatgcagtgtttgatcttctgttcctgtgttagtttgctaaggataatggtctctaactacatccacatcccttcaaagaacaagatcttgttctttttttatgtctgcatagtattccatggtgtttatataccacattttctttatccagcagaccactgatgggcatttaggttgattccatgtctttgcttagagaaggaaataaaagggtgttccagagggaatacccagtgccaagctctggttcaggagtgtggctgggatcctctaaaactgcaagcagttataactgagagttcttgcttaaagtgtggtttatgttcaaccatctggttataactgagagttcttgcttaaagtgtggtttatgttcacccatctggttataactgagagttcttgcttaaagtgtggtttatgttcacccatgtggttataactgagagttcttgcttaaagtgtggtttatgttcacccatctggttataactgagagttcttgcttaaagtgtggtttatgttcacccatctggttataactgagagttcttgcttaaagtgtggtttatgttcacccatgtggttataactgagagttcttgcttaaagtgtggtttatgttcacccatctgggactatacttttgaagtctatacttttggaaggatagatgtttgattttttttttttttcttttaaaactagtaagtcatttttgttcagttttttaagtgtctattttatatattcaaaagtaagttgataatgctttcttgtgctcattatggcttaaatttctactatgtttataagtgctgaccctcttttcatcatcatcttgtgtcttttgatctatctccttctttttctctttacttggtaaacaatctggctggaaatttgtctatttaagtatggtttttaaagaatcaactttattttttattgtactgcttccttctttctctttgatatatttttacttcattataatttacacttattttgtgtgtttatgtttatatttcttatataattccagcttttgctgtattcaacagtcttcctttttatgtgcaatttttcactgtcattaagttctaaataaagtataacttctatttttatttttctttgagtcataaattacatgcaagcttctgtttaagtttgcaaacaacagcattatctggctgcctctttttattgggttctttcttacatttgggtcagaaaacatagtcagtctaaaacagttttcttgacctctaaacattttgctaaattcacttattcaaaattttctgctaatcagaatattatgtaacataatcagaacataccacattacactctgataatcaattcactagaaagatattgtcccttatgtattaaaatttgttcattttttggaattctcagaaatgtttttcaagaacactttccgttaacattttacaaaatttaaaaatgcaagtaaatttatgcctaatcgtacattaagtatgattttataagtggcatataaacagattgataattcctttcctagagtgtagagatgccctatgcactgcaagacagtcaagggaaggagttggtttggtttaggatgcgtgataaagcatctcatgaagtatctgtatgctcagttttagaaaatggatcccatttctaaaaactggattcattgactacattattaaattgtttcaatgctgtattccactatatgttgcattctatagaatgtttacttaacatctttggaataatcattaagtaaacaaaaactgtcccctcttcctcaaaactttcttttattcccatgcttatccactgtcatcaaattaccacatctgacagaaataattttaatttcaccatcaattgctaggatattaatttagactacaaatagctgcatataaacataaatgaaaaaatatttttccactctcgttgttgaaacagtgggagtcctgaatgatttgatagctgtacaattaatcaaataatagactactggattaaatctcagtgaactaaaaatatctgtgcatagctgtaaacaaaattaaattaatatcctcagtacctcttatgcctttaatgctatcaggatcagtagatgtgattttaaatgacgattcatataaataggaatatacgtaaaatttaaaaatactaagtgaatttatacctaattgtactacattattaagtataattttctgagtgttactcctaaccagtagcaaatatgttatatatatgagatatatgatatgtgtatatatgatatatgatatatatgttatgatatatatatgatatgtgatatatatgttactgggtaggaggtacagtagcaagttttctttcttaaaagaatggtatactctgggtctaagaatgacaaacagatgatgtggtggtcacttaccagagtattttatttatactgatctgtacccctagaatattcaaaaatgaggatgtatgagatatataatactttttattctatttttctgagttttccctcccagttaggttttcggaatacaaacatggagcagttacatgacataagggcaaatagtataagaattattacactttattcatttgtatcttgtatacttcctctattgggtaaatggatagatgcaatgaactgctaaataatacctgttgaatccaacctgagtgaaaacaaaatcttatgcctattgaaaagcatacaatgtttgtagtagggagaaaggaatatgatagatgtctgatatttaaatgtaaaaacgttggccgggcactgtggctcacgcctgtaatcccagcactattggagtccgaggcacaggcagatcatctgaggtcaggagttcaaaaccagcctggccaatttggtgaaaccccgtctctaataaaatacaaaaattagccaggcgtggtggtgcctgcctgtagtcccagctacttgggaggctggagcaggagaatcacttgaacccgggaagtggaggttgtagtgagctgagaccgtgccactgtgcttcaacctaggtgacagagcaagactccgtctcaaaaaaaaaaaaaagtaagaacattatatgctaacgtgaatgaaatataaacaattttcaattttatattatatacaatggcagatcatagctgcacctgtaagagaagatcaaattaaaatcggttatctgtttgtttattctcttatcagtgcctggctttctagaaaaatttagctattttcatggaattctctgataaacattatgaactcatttctttctataatatgttggtaatattggccgtatataataatttagaatctcttattctcctttatttttctcagagcagtcattgccatttgacatgttatattttatttttgttagtttcctattttaccatacagctaattaaaatgaacttttcattaattcaattactgttcttttcactgttatagcccaagtatctaaaacagtgtctagcactaagtagtcaccaggtaagtctttgctgagtgaataaatcttagaaggaaaggagagagaaaatctagatcctttatagtatccatggttttctacaaacaggtagaatgtaatattttattattttgcaccatgtaagttagaatcattgtggaacatcacatttatacaattcttattagactatatctagatctcttttaaaataagcaagcaagcaagcaaacaaacagcaatgaagatacgctgaagaagttttgggaggaggacctacatctttacagtttcacccacaacttacccataccctccttcaatgaattcctagggcttcttagaaaatagtggatgcaattcaggaagtgtttgttttaaaacaccaagaatgatgactgtccaaattcagaatgtgttcatgtattccatagacaatgactgaatatctactaggttctgaaaaatgtactagttgctgtggtggataaaataataataatacactgtaagacagtcaggggaagaggttggtttggtttaggatgcatgataagatatctcatgaagtatctatatactcaattttagaaaatggatcccactcttaaaaactggattcattgatggcattatcaaattgtttcaatgttaaatttcactatctatagtgttggaatattagtccagtaacaatatgaaaccaaagatacatcactatccagtaaggcagtttatattattaccacatagtacaatgtgttaacagagatcaaagataaatgaacacttccaacataaaacgtataataatttacttcaggtaacatatttttaaattatgggtataattatgggcataatcataattactacttagaaatgtattatgtgtatcatttaacattttatatataacattttgaatttttaaaatatttatgggtccttgttgttaaaatgaagtggcgttccagaaatagttgattgtagatttgttgcacgtaaaacagagaaatccagcatttataggtaacaccacagttaagaggaaagaaaactaagaaaattgcagtagaatacttttgtgaggaaaaaatgaaatgtcaaagataaaatttttatggttctttaatcacaatcatcaaattgtaacaaatggaactttaaaattgaatttgtctcttgtctgaattacacctgagattatacctgcacaccaagtgaagaatcatatttcaaaatgcatttcatttggcttttaacacagttattctgttgaagacatttctgtaaagcttgccagatacaggaaaagcaatttaataaacactgtgatcaaataactactcaattgttcttcatcttttttaacatttaacaccttgcagatcattgctacaataaagtgtgttatccccttttcacaatgattcattaacctgtattaattgttctttacaaagttgtttttatacatcttactaactaccaatgtgaggaaaaggtctatgttgctttcattcagtagaaaacacatgcactttaataatattgtttcttaaaaaacacctattggtttgttttctttcagtttctcatttatcatcatttgttcatcttcactgaaagctgaacatatgcagcctaacaacaacttgaattaattgaatgtttcgtatctattctccaaattaaattttcagttttgctcaccttttcatgattatattaagaaaatgtagccataattgcttgtatgggaaaaattactgagaaagacattcagattaaatgtaggaaatgctctaaggatctttgaaaggaaagaaatgtcaggttctatattgtattcaaggaagataggagatgaaagtgtcagatatgcaaggcagataagaaaatagtttttaaaaataagtcatagacattctttttctgatagttattgaaaaatcctgttcatcaaaagatatcttaaatcaataaagatttcctcaacaaccagacaaaatcgttctgtgtgtgtgtatgtcttattggaactgtaattatatttacaatactataattagtcgtgttattaactcttgttactcactagaacattattggtaataagcagtgacatatcttaaagatttttcttgtgtcccagcgtctgcccagtgattaatatgttcagctccataaatgtttattcaacgagtaaattagtgactaggtactaagttcttattcttgtgtacagtcacctatcaaatctttccactcttctctgggcaattggggaagctatgtatagaaaatggaagagtctctgtcagcctgggttactaagggtgaacctgaactttctctgagtgaaaaaaaaatctattttactgagccacagagatttggatattcatattttatagcagtattaactaatacaaggtatttttaacctttaaaagaaaagaagaaaaagtagaagtgatactaatttcccagatgccatccaactcctctttcaccaatagatagcattgaaaggcgggaatcagtgcctcctcctagtgatagtgcctcagttgagcagggcttattccgaattcagtatgcaacatcccgacagggcaaatctagggattgctctcaagtcactatccaacatcccgatgggttgaatggcatgccaaacacagcaataagcactataaaaaagccaggccgccccggggtggggccacgtggcttcagaccagagagcggagctaccttggcccaagcgctgcagctgcctgaaccccggggcttcgcagccttgcttgttttctctgaaccgcaataggatggtgttcacagcgattcaaagggtggcattgggttggacgttttggttacgagccagcctattcccacattgtacgtgaatgtttaatgtgctctcaaaacatggaaaataagtttagtgcacatagctaaatcacaaaacatccgatttctgtttcctcaggaagtcattactgcgccaccacatcacgtgaccttaacatgatcaatgtatttctctgccttgacatttaaataaactatataaattaagataagtagattagaaaatcattcaaattataccataatctgtacaaatattgtgtcccctgccaggcaagggacagggtgccggcgacggccgcgtggccaaggccccgcaggaaagctcccaggtctccctcactctccaggtgccctttgcacccaacagtgcgtgtgaggaacgaactgctgtttgaacgtcccctgagattgtgcgtagccccgtgtaaatgtaatagcctccatggcttaattggctatcaagcgaattttcccagatgaaagcaatgttgggttaggggacgacggtgcagccacccagcctttaccagcagcgtgctgcagacgaaggcagtcaaggtgtggaggtgatcacgcaggtacatgtttttgactgtttaatttgaaagttcacattttttatgctttgcgttgatgtgtaatttttgtactcttggtgactagtttttgtcaaatcttttttggaatattgcttaaatgttttgattttatgatagtgaagcttgtattcagtgttttgtcaattaatattttatgctagtaaaaaaagcaaaagagaaaaaaaaaagatcttagtctgtttctaaggcccagaccacacaaagtatccattttcctctcttgtctataaaacaaaactcaccttatcaacagtttctgttctacccaaagatgttaaataaagtccaaggtagtgggatgggggaagtgatgttttattgtctatggcacgtgtgttcctaggacctataaaaaggaaagcaggtaaatgactttgatctgtttgataaatgatttttatcttgagtagtgtagtcacttaaatatgttgatcctccttctgggtggaaattatttcaataccatgttgtttttgttattattaactatatattattatgtatataataatacataaaagttataggaatgaaataaaaaattattgaaatcctaacacacagttgtagctatttttcattcatgtatttattaaatattattaaattattcaccacataataaatagtaaagcattttccacataatcatatctaccgttttattcatggaaatcattttatttgattatttaatatttattttagattaagcatgcatgtgtacatttgttacatgaatatattgcatgatgctgaggtttgggcttctattgaacatattatctgaatagtaaacatagtacccaataagtagcttttcaaaccttgccttccttccttcccctgttttggagtccccagtgtctgttatttccatccttttgctcctgtgtacccaaagtttagctctcacctataagtgaggacatgcggtatttggttttctgtttacatcttaattcatttaggatgatggcatccaggcacatctatgttactgcaaaggaaaggatttcattctttcttctggctacatagtattccatggtgtatatgcatcatagtttctttatccaatccaccattgttggaaaccaatgttgattccatgtctttgctatttcatatttgcaatataacatgcaagtgtgcagaagctctttagtttaatttggtctcacttgtcaacttttgtttttgttgcttttgtgttttagtacttagtcataaattctttgcataggccaatatccaaaagagcttcttaggtctaattctaggcttcttatagtctaaagttttacatttaagtctttaatcaatcttgagttaatttttttatatggtgagagacaggagtctaatttcattcttctgaatatggttagccagttttcccagcaccattaattgaatagggtatccttgccccattgtatttttatcaattttgttaaagatcagttggttgtaggtatgggacttcatttctggattctctattttgttccattggtctatgtgtctgtttttgtacccaaaccatgctattttggttattgtagccttgtagtatagtttgaagtcaggtaatgtgttgcccctgcctttgttcttttagcttaagattgctttggctattcaggctcttttttagttaaatacaaattttagaattgattttctaattctgtgtaaaaataactttggcagtttgataggaactgcattgaatttgtagattgctttgggcagtaaagacattttaatgatgttgattcttccaatccataagcatgtaatatttttccatttgtttgtgtcatctatgatttcattcagcagtgttttgtagttctacttaaagagatcttttacctccttggatagaggtattcctaagtatttcttttttttttttttctgtggctcttgtaaatgggattgtgttcttgatttggttctcagtttgaatattgcattgtatagaaatactactgctttttgtatattgatttcttatcttaaaactttactgaaatttttaatcaactctaggagtctttggtcagaatcattagggttttctaggtatagaatcctatcatcagtgaagaaataaaatttaatttcctcttttcctatttggatgccttttgtttcttgcttttgtctgatcattctggctagggcttccagtattaagttgaataagagtggtgaaagtggatattcttgtcttgttcttattcttatgggaattcttccaacttttgcctgtttagtataacgtagactaggtttgtcaatagatggttcttattattttaggtatgttctttgaatgcctagtctattgagggttttaattatgaaggcatgttggactttatcaaatgttttacctgcatctgttgagataatcttatgttttttttcattttaaattctgtttatgtggtgaatcacattaactgatttgcatatatttgaacaactcttacatcccaggtataaagttcacttgatattgtattatctttttgatgtgctgctgaatgtggtttgcaagtactttgttgaggattttttcatctatgttcatcagatatattggcctagggttttgttttttgtgtgagtatttgccatattttggtatcaggatgatataggttttgtagagtaagttagaggagaatctctcatcctcgattttttggaatagtttcagtaggattggcatgagctcccctttgtatgtctggtagaattcagctatgaattcatctagtcctaggcttctattacttattcaattcattctgtaattcattgttggtctgttcagtgtttcaggttcttcctggttcaatcttgggaagttgtgtgtttccaggaacgtattcatttcttctaggttatctagttgtgcacatagaaatgttcatagtagtctctgagaatcttttgaatctccgtgggactcgattgaatgtcgcctttgttattgctgattgtgcttatttggatcttttcttttttgttaatcttgcttgcagtctatcaattttggttacactttcaaagaaccaacttttcattttgttgatcctttgtgtggatttttgagtctcgattttattcagtcctgttcttatttttgttatttcttttcttatgctatatttggatgtagttttttttcttgttttactacttgctctgggtgcaatgttagattgttaatttgagatatttctatctttttgatgtaggtatttagcactataatctttcctttttaaactgctattattgcatcccagaggtttttgttcattgtgtctctattttcatttgtttaaaaaattctttgatttctgctttaattttattgtttacccaaacaaaagtcattcaagagtaatttctttagtttccgtgtgtgtttgtgtgtgagtgtctgtgttttagagttcctcttgctattgatttttatttttattctactgcggtccaagaagatgcttgatattatttgattgtttttatttcttgacacttgctttataactgcatatgtgatcactcttagagtatgttccatgtgaagatgagaaaaaaatatatatattgtggttgttgggtagagtgttctgtagatgtctattaggttcaattggtcaagtggcaaatttaagtccagaatttatttgtttagatttctgcctcaataatctatctaccactgtcagtggagtgttgaagttcccagttattactgaggggctgtctacctcttaggtctagtagtgatttctttatgtatcgtgatgctccaattaatattgggtgcatatttatttaagatagttaattattcttattgaattgagccctttgtcattaagcaataacatttttttgtccttgtttctgtttttggctgaagatctgttttctctgatatgagaatagaaactcctgctcttttatgttttccatttgcatgattaatctttctctatccctttactttgaacccatgagtgtcattagttgtgagatgggtctcttgaagacagcagatgggtgattctgatttttttattccaattcgccactgtatgtcttttaagcggaggatttaggccatttatgttcaaggttaacattgatatgtgagattgtgttcctgtcatagttttgttagctagtttctttgcagtctcaattgcgtagttgctttatagagtctgtggactatgtacttaactgtgctttttctgtgtattgttctttcatgtccacatttagaactcccttaagcatttctgcagggctagtctagtggtgataaattcccttaccgattgcttgactcagaaagactcaatctctccttcgtttatgaagcttagttttgaagaatatgaatgtttatgctggaatgtcattccttttagagtactaaaaatagacctctaatctctgctggattgtaaggtttcttctgagaagtccactgttagtctgatgggttccctttgtaggtagtgttgctcttttctctagctgtgtctgagatttgttttttcttttgtgttaaccttggatagtctaacgactatgtgtcttggggatggctgtctttatagtgtataacagaggttctctggatttctggtgtatgcatgtcaacatctctagcaaaattgagaatattttcttgaattttttcctcagatatgttttccaagttggttactctttcttttctctcaggaataccaataagttgtagaagtggtttctttacataatcccatatttcttgaaggctttgtctttttaaaaaatattttttctttatttttgcatgactgggttaatttgaagaatcagtcttcaagctttgaagtgtttccttctgcttggcctagtctgtttttaagtctcccaactatattttgaaatttatttagtgaatttttcagttccagaagttcagtttggctctttcttaatataactatgttgtctttcaaatcttggactgtttttctggtttctttgcattggatttctattttgtcttatgtctcattgactttccttgacatccatcttctgagttctatgtgtctcatttcagacatttacatctggtcaggatcctttcctagggagctagtgagaggctttggagatcacaaaacactctggctttgtgtattgccagacttcttgtgcttattcctttccatctgcgggagttgacacttcttttttgaatttgcttcatttagatggggtttgtattagtcagagttctctataggtaccgaagtaataggatagatgtacatttgaaggggagtttattaaggatcattgactcacacgatcacaaggtaaagtcccacaataaaccatctgcaagctgaggagcagggaagccagtccgagtcccaaaacctcaaaagtagggaagctgacagtgcagccttcagtctgtggctgaaggcctgagagcccctggcaaaccactggtgtaagtccaagagtccaaaagctgaagaactggaagcatccagcacaggataaagatgaaagccaggagactcagcaagtctgctcttctgccttctcctgcctgctttgtcctagccgtgctggcagctgattagatggtgcccacccagattgagggtggttctgcctctcctagtccagactcaaatgttaatctcctttggcaacaccctccaaacacacccgggaacaatattttgcaccctttaatacaatcaagttgacactcagtattaaccatcacagggcttttatattttttattctctttgaaagtatgacagtggtgtatgtgattgattggcttcatttctctgtagttgcagagggtgaagtttccatatatgttccttggttacagataggttgctgcagtggctttcacagatgttgcttgttttagcaatgtatttttatatgatggtataactcaaacttcagtctggtagatggacttaagagtaagagctggcaggtggggtcttggtgcatgcttgccctcactggagaatcatgagaaacaacttctttcagtgcacgctttctgggcccctatgggaagagctattgttgcatctgcaacagtgcactggggaggggagatggaggcgagacataattccttctccaagtctggttctgggccttggtggtgctcctttcagtggcttatgccatggccacattttctttgtctcatgtggtgctttggcaggctgcactcccccttcccttagggatggtccacactgaggattacatctctagggacacacaactctccagagacccaccagtccactgtgcttaccaaagtcagagcaggttttagggtatgtctgcagttgctctgatgatgcagtatttcaagggtagaggatctccaggcagggcagtggcacaatgggtgcaacaccagtatggagtctgcagcccatgattttcagcccagcaggcaaccatggagtctgcctagcttacactcccctgacccagcagatctcccacagacactcgccctggcggcaagcccaaccaactaggctttccccaagccatctgctcccacattgttgagctgctccaggcattctgtgccaggacactccctgggaaagaagctaccaccatcaggccatacccttcatggtctggtcttgcaaagggaggggtgtccagctcccatgcccccatgagaacccataccacacccttctctgcattctgactatggaggatcctccttcacttgagattaggttacaaatctcagctcagtgtccctgggtggtatacttgagtcttggggagttgggactgggctcacggatttgtcctctggcctctaagcttcaagcactggctgtgacttggggacagggtggtgagcttttcccaggctgtcaacaaaacactcaagctatgcagtggatgctgtgctgtggacaccctcttgcaggcgtgaccaggcatgagctctgggaaggggttgacaggcaagggggcatgtggaccagatgcaacttaatcacacagcactggtgatggggcctatcttgggcatgtgagcaggccaggcgcggttcactcccagcctggcggacagcaggaacttagccactcagtatgaaatggaggcttgtgggatgggcacctagggttgcattttgctgcagctgcacagcacaacaaagccttctgggctctgtgtgggttcaaactgtgcctctgcatgtgctcgaggcagctctcctaccagtccaaagatctatgagggtcgtagaaactcctgtaactaggatctcagaggtacattatgggtatgtagtgtcccagggttccttcactcaccccttccttgggtttgttcagggtatatgggccagtcctgatgtctagtgactctgagcagactgtcccatttcttccctcttcaaccatggtgtctgtgtcacctctgtgtcaactttcagtgttttctctcaaaagatctgtttaaaatgtgaaggtttactagatatttgggttcctctccatggaagaggcacttcccaactgcatctccttggccatctgccattctccaaatcttttttggtgcctatttttcctttttactttctgtgcttcctccttattctcttcctccaacactgatatgtactctgacattcaattctaaatatatatattataaaaaatagatataatgtgcatatatgtgttcattaaggatagaatacttggctgggcacggtagcttatgcctgtaatcccagcactttgggaggccgaggtgggcggatcatgaggtcaggagatcgagatcatcctggctaacacagtgaaaccccgtctctagtaaacaaaatacaaaaaattagccgggcctggtggcgggtgcctgtagtcccagctacttgggaggctgaggcaggagaatgtcgtgaacccgggaggtggagcttgcagtgagctgagatcatgccactgcactccagcctgggcgacagagcaagactccatctcaaaaaaaaaaaaaaaaaaaaaaaaaaattcagaaagaaggttactacatctgaatttctgaagatggttttagtagggatgaattcaatgtaatccatggattattcatgactttgtagaaaggttaatgaatgtttcttttagccactcgggttgggacctctgaatcaataggaagcataaatgagagatgtcaggggaggattgaaggatgctgatggaggtgggaaggcctgaagtgacccgcctgtgctagactgaaagtgattcaggccccacccaaatgcatgagcagtggagcctaaatccttcacaactgcacattagaggagagaggatttgaccatcatcctgcaattagagttactgttaatcaaggtaggaggacaagatgcgttcccacttctgactctgattgccctaaatagaggccctgagtggtaataatttgttttgaaactaggagacagttcagtcagtgtttcatcagattcatgttttgctgaaaatactggcacattcctccatttaatgaggagtcaccacaggtaactcaagggccttagtcctgctgcccacataagggagttctggtcctcaggaaatggggccgtatttgaaggtaacgaaagggataagatgagacatgatggtgtgatgagtattccagtgactgcttttggtaaatttgggctggcatgtgggtttcagttcctctgtctagaaaggaaatgctcctcatgactgacaaaagcaggaataggttttatcatcagctctacaccaaggctctccagttactagagtggtctctagaagacagcattatcagcaaattccattagcaactaacttgcttctgtggtgctgtgttgttgttaatagttttaattatagcagctgcaatgcagggaacctgatccaaaaaaggcacaaaccaaaacctgtgctcctaaggagattataagaaatgaaatcaccaacactggcctctctttgggaggaaactggaaatggcaagagggaccactcatgggctaaagcccagcacttgggtcacaactcaccctggagaggccaagtatgggccccattgcttcaggccttggctgtggatcacaccctggattcttctcttccaggtgcagctcagttgccgtgatgctccttgagtcaatgagctctttggtctgctcttctgctcaagcagaaaaggattggcacttcacccttgagaagctgacaagaaccacaggcttcttcaggcaggtggtggaacatgggtgtatcctgcaggtgctcacagtatctccctttgctcaggtgacggaggcttggggttttccagctcttgacctaaaattcctgaatgattgttttcaaatttcttaatgaataataggatgaacttgccacccctgtcaggggggaatggggttcctgaaagctgagaggccaggatccagatcctgagcctcttcaccaagcagatgctgtagagcaaaggcagcaactatctatctatctatctatctatctatctatctatctatctatcatctatctatctttccccttccctttaaggaaatcctcaggactaggtgagatcttagatctagtggagaatctgagctgctccaagcaaaacctcaggatcctgcaatctgaaaaggtagaaccaaggcaaatgtgggcagcaatacccagaagttgggtactgagcctgttagggagcatttttttcaggggagtgaagtaaacaatgaggtgtagagagcagcgagaatgagaagccaaatcacagactacaaaatcacacagcatctgtcctttctccctgggcagagagagtatgatgggtagtctccaatatagaaagcccattgtgtccttcagctcccccatacagtcgcagaacaagcctgattctgaaatttctattctctttaggctctagcctgattttctggctcataaggccaaagggagctggaaaagtccccacggcaggactcatggtggagagagaatgatctagaggattcaggcctctgcatactgtgtctgggtccctccttaaagaatgataaagacaagtaaagagcttgaagcagcctggagtccagccagaaacctttaactgagctttaaaggagatggtcacaacacttttcagaatactggcaaaggcctcctgtggccaggtttgtcctgggatgagcaaaatttaatgttaacctgctgtatctttgcttttaatatatctgcttgcccatcacaatgatgttatggttaatttcaccaatttggtaacctgcctcttgggaagtacgaaagtaagcaagggccaggtgtggtgactcacgcctgtaatcccagtactttgggtggctgaggcgggtggattgcttgagcccaggagttcaagaccaacctgggcaccatgacaaaaccccgtctctacaaaatatacaaaaattaaccaggagtggcagtgcatggctgtaatcccagctactcggaggctgaggtgggagaatctcttgagcctgggaggcagaggttgcagtgagctgagatcacaccactgcattccagcctgggcaatgaagtgagaccctgtctcaaaaaaaaaaaaaaaaaaaaagagagagaaagacagtgagggtgtcctgtgaatcaaatctttgaatggatgttttcttaactaaccaagacctctgtaagaattctgtctttgattccacaataaagtggtgtgaaattactataagcaaatgtttacatgtctcatttaatcttcacaacaatcctatgaggcaagtagaattgttatcctcattttctgagcgatgaaactgaggctcaggggagggtgtgaccttgccaagtccccacaactggaaaccacggaacaaaatgacctgagtcacacatgctagaaaaaactcattgtgcctccccatggagattcacaatggctatttctgttgcaatagaggatgaagcaggtggtctttccaatcaacagctgttaagaaaggctccagttctccccggggaatctcagaatcagactgaagattcagaagagcctttgctgaccactgagtcaaactccccagaatccttttgtagtaccgctgaccagtgagtgatcatcaaacctccaaagacttcggtaatttgcagattctagggaaaattccatgagttaacagaggtgaaatttgaaagttccatagagaaattctggaacttgaaattatcataggaagattattatgcaatttcgttcctgttagtagtctttaataaagagacttcaggtgaacattgggttgaaccaagattactttctcccattgtcaccattctgatttcagattgttccttgctggtttatatcctcttcaattccattttgtaccagatagaggcagagtagaaggaaaaactgaacaacaaaccgcatttgtgccagctcgagggataaacaccctctaaggagcatctcaagctttccacaagatttcaacagggtcaccccagttcacagccaggtagtgtgtcttcaatgtgtggccaatcgctgttggacaaacaggaggtgttttccccaggataccctgcactagactcggcatcttttcagtcttcttcttattctgtctccttcccagcacactgacactggaagcacactaagtcatcacatgagcaattcacaggtgccatgaaatacctcacaaatgtacagtactttaactgttgaccccatgtattaggtaagaaagatattattatttacatttatctattggaacttgggggcacagagtgtttaaattacctgcccaagggcacacaagtcactcgcctcttgtgtttcaattatacaatggcttagtgattctttctttcagacgattgttgtgaggagtgaatggaattaaatcaagtctatgtggaaagggcctggagtatgagttctcaatgcagggtgactactgtcagcaccaactagttatgataatgaccatgatgatgatggggaaataataacaccttgaagtaataataatgaagttagaacgatacccccaaatgtatgaaaattacatctataaaatgagttagtttataaatcgtgagaaaatgggcatcctcaggtattgcaggtagaaacacacaatggaataactcttgtcagcaagctaatccatttccaggaatttttattttttttttttttgagacagagtcttcctctgtcacccaggttggagtgcaatggcatgatcttggttcactgcaacctctgcctcccaggttcaagtgattcccctgcctcagccccccattagctgggactacaggcacacaccaccgtgcccagctaatttttgtatttttagtagagacgggatttcaccatgttgaccaggatggtcttgatctcttgacctcatgttctgccagcctcggcctcccaaagtgctggaattacaggcatgatcaaccaccccaagtccagaatttcctaacaaggtctcaagagatgaaggtgctactgttcagtgaccccctgctcaaaaacactgccctaggagatgggggctcttctatgccccatttttacaggtaaggctagtcatggaagtgggagatagaaaataaagggtggggtcaggttcctttctaaaaacctaaatgcatgtcaggcaagtagggcttagaaaagaatttaccctccttcacctctgtcacctcatccctccttccaacctccatcacttgtgtggcaaactggactcggagccagaaggcaccagaaaaagtggaatgtgagcctgcaggccatcaaggtgaagccctgaggatcccccggggccagtccctccactttgatgcggataagcctcagctagtgtcaagttgaaaggagaaaaagacaggtgagtcactgttaaagaaacaggttcacatatgtaggtctaggagcactgcaagtagttcttacagtgagagagagcaattgtgctcaactctgaatccagcacaaggaagtggtaattatactcaaggaggaggatgggggttagcagataggaaatgactatgagggaacatgaagggtaagggaggattctggctaaactgacctaacgagattctcgctgagcacaggccaaggttatctgacatcagctgcgggatggtgggggatgaggaccctgatcagtatatggtggacggggattcctgccagctaaactgacttagcagggtaatttcctaaaactgaattttacaaaaagtgcacagatgggtttagcagaaggttcagaagcctgaccaatgtacggtcaagcaaacaatttctgtcaccacacagaatgcatgctccagggaccatactgggcctcagcatcttcctaccccaccagcttccaggagggcattttgccctgggcctcctgggtgtttccttgcctgatcatttctaggagacaagagacttgcactttatcatctaggataaattcagtgtcagatttttaagcctaaatcggatgacagtgcttcagtgacaatctcagttatttaaaaagggaggttcattcattcaccagttctaaaggtgcacataagacattcttttttttttttttacaaaaaaattgagaccaagttaaaagaaaaagaatgaaaaaaatcaagcaacccgaatcccttatataatctcttcaaaaccccaaaccagggaaatcttctcaatataaacttgggaattttgttgatcactgactgcagtctggtggtttatacttattttcttgtgtcccgtttcctcccttctcccacccccagcccctcagcaggtgctgccttcctgtcttggtctcattgtcctcaaatcagacctgcaggtatggtcccaagtgcttctaaccttcatcctcatatccacgggatcccctgagaacccagcttctgttattgagaactgtcccacctgctgactaaggagtctgatctttattcagaatcattgctaagataccagaagaaataacatgtaagagtctagtatagaactcacagttctgatctgaggaactaacaattgcttatttgaatcactgtatttcctatttatattcttttttttttttttttttttttttttttgagatggagtctcgctatgtctctcaggctggagtgcagtggtgcgatctcggttcactgcaacctctgcctcccaggtttgagccgttgtccctgcctcaggctcctgagtagctgggattacaggcgcccaccaccatgcctggctaatttttgtaatttattttattttttttgagacagagtctcactctgttgcccaggctggagtgcagtggtgccatctcactcactgcaacttctgcctccctgggttcaagcaattctcctacctcagcctcctgagtatctaggattacaggcgcctgccaccatgcgtggctaatttttgtatttttagtagagacggggtttcgccatgttggccaggctggtctcaaactcctgacctcaggtgatccacccgccttggcctcccaaagtgctgggattacaggtgtgagccaccactcccggcctatattcatatttctattcacaatatctcctacacagtgttttcctgttctatggggagaaatcaggcagatagcagaagacacaggtcagatctcaggaagagtttctatggcctccaaacaagcatttattgattatagatgtaggggtgaatattacgaatatggggagatgtcccacaaggttagctcctatgctacctaatgcaccaggcagcttgtccataacttagtttaaatatatctgtcaggctccatgcccatttgctgtaaaagcaagattactgaggtaatcttagattttaaaatggaaaactgggcctcacaaaagcagttgggaaaattacctggagattgtttctaaggcagtgcccaactgtaccaagcaaaggacaacaagtacaaagtcagagcttcattaacttgatgattgattcattcacttacttaatgcaagacttcaggggaagaagagtcgctgagtggaggagacgggaaacaatgcattatgaaacgcccatggtctctggatacccacccagccagtccccaccctcctagggtctggtctcgaccatctcatcatgtgttttgagggtgcgttttcctaccagttgtttttttgtctttgagacagggtctcctctcgcccaggctggagtgcagtggtgcgatctcggctcactatagcttcaaccttccgggctgggcgatgctggtgcctcagcctcccgactagctgggaccacaggcgcgggccaccacactcggctaatttttgtatttttagtagagaaggggtttcgccagggtgcccaccctgttctcgaactactgggctcaagggatctgcctgcctcagcctcccaaagtgctgggattacaggcatgagccaccagcaacacgcccagattcttctacacccttaattgggaggtaaggcttctgcttgcaggctgtgcgttcttccagccagccgcacctttgctgtggactaaacaggaaccactggattacagtcctctggctctctgccctgcaggagattttaatcaaaaattctaggcctaagggaaaagcagggttaagctgaaaatgcacacagggctcctgtaaatttcttttcataaaccacccgcccagggcattaaatagggtacttagttgatccgaaccctccagggagacctccgacccttctcttcgtagcccccagctcccctcccccggttccactgaggcaaggggactgagctgctccacatgccaggagtcagcacgccggaaggccccgcccagcggctggcgcagccaatcgcagagcgggcaagtggtgggggcgggcctgcctgggcggcaagggggcaggggggtctaggggctttagaggtcaattagctgctttcgggcggccttaggcgacaggagactcctggacccagcacctgcccactgtgcctgtccacctgtggctacagcagctgagaccccagtgggctaagattggacaggggccaccagggacccagcaagtccttcagctctgtgagtgagggattttccggagtgccaggccgcagtattcccagggccggtgggggtgggacagggaggctcgaccccggcaaatcaggcagaggcgccccttgctccctgcaacatcgcccacgtcctggggccacagtgagcatgagcggagggcgggagcaagagccaggggacctggcctgggtccccagcccaaagcctgggaagctgcctacccacccctgtgtgggcgcggacactggggactctggcttccggtggttcggccacctgattcagtttatgctctgtgaggggagctggagtgttggcaggactggcccacctgcaggactgcaggactgcgggaacggcggtagatgggtgctctccttcccagtttgtcctgggaagacattcaataactgtttcattacaaggggcatttggaaaacatacttcaccttctgttgtgtattagccaagaacaaggtgtgatgtgacttcccaattattggggatccctttgtcccttcttgaaattagatgtcttcattcttgaggttttgcctggatgacctcagcacaattggtacaaaacctgggccaacggtttcctagtttcccggttgttgccttaagcttctcgcccatcaggtaccttcctgtccttttcgtagcctgtcatcatcatcccagaaaactgtttcaactcctacagctctggacaggctgcttttcattttggtgggtccctccaatacctccacttgccctgtttttctccagccacatccttggcctcttccacagtccttaggtaaatgcttggaagaataatttaaatatttttattctaccatggtggccctagtttctcagggggtagtaaaatggctttttaggatcggtctaatcagatcctcatttcttttcccttcctagatttttgaaacatgaatccttcactcctcctggctgcctttttcctgggaattgcctcagctgctctaacacgtgaccacagtctagacgcacaatggaccaagtggaaggcaaagcacaagagattatatgacatggttggtggcatctgaaactgtccaggggaacaccagagagatgggcattgctattgggatcatatggccagagagtggcttctagaggctggctcctaccaataagctaacacaataacttaatagcactgattatgagcacgatatgggcatacacccttgttgtgtctcagcttggaaaacatctcctagaagtgtcaagccttccctggccatggttactcttacatctctgtctgaagattcacttggttagcatatgttgggttttaattagaaataaatagcattggcggggcacggtggctcacgcctgtaataccagcactttgggaggccaaggcaggcggatcacaaagtcaggagattgagaccatcctggctaacacggtgaaaccccgtctctactaaaaaaaaatacaaaaagttagcatggtggcaggcgcctgtagttccagctactcgggagactggggcaggagaatggcatgaacccaggaggcagagcttgcagtgagctgagatcgtgccactgcactccagcctgggtgacagagcgagactccgtctcaaaaaaaaaaagaaatgaagaacatcagttacatgtttgcctttagaatgaagaaggatggaggagagcagtgtgagagaacatgaagatgactgagcagcacaatcaggaatacagccaagggaaacacagcttcacaatggccatgaacacctttggagacatggtaagtatgctgtgggctgcccagctctgtgcttcccctcctcagttctttaccaaattaatctcttgcttcttaacattttatttacttttctttgaagaccactgaagaattcaggcaggtgatgaatggttttcaataccagaagcacaggaacgggaaacagttccaggaacgcctgcttcttgagatccccacatctgtggactggagagagaaaggctacgtgactcctgtgaaggatcaggtgagactgtgttaggttcagacctcccatcaccccaggaaagccaagaagcaattgacatttgtgctatggtagactgtgcagcaacatgcagttcactttttttttttgtataatttttttgtttgtttgttttgagacagagcctcactctgttgctcaaggttgagtgcagcggcgtgatctcgcctcactgaaacctctgtctcccagattcaagagattatcctggctcagcctcccaagtagctggggttacaggtgcctgcctccccttccagctaattttttgtatttttagtagagatggggttttgccacgttggtcaggctggtcttgagctcctgaccacaggtcatccacctgcgtcggcctcctaaaatgctgggattacaggcatgagccaccaagcctggcctgtttttttttgtttgttttgtttttgttttttttttttgttttgttttttgagacaggtcctgctctgtcctgcaggctggagtgtagtggtatgatctcgggtcactgcagcctctgcctcccaagctgaagccatcctcctgcctcagcctcctgagtagctggggctacaggtattcaccaccactacacccagctaattttaaaatttttttttcgtagagacagggttttaccatgttgcccagcctggtcttgaacttctggggtcaagtgatccgcctgtctcagcctcactaagtgctgggattacagctgtgagccaacacatgtggcccttcatataattttgaccttttaaaatgtattgagaattgttttgtgacctaacatatgatttatcatggggaatgttccatatgcacttgagaggaatatatattctgcacttgttagatggagagctttctatatgtctgttaggtctagttggtttagtgtgttgttcaattcctctagttccttattgattttgtctagatgttctatttactgttgaaggtggggtgttgactgggcgcagtaggtcaggcctgtaatcccagcactttgggaggctgaggtgggtgaattgcttgagcttgggcatttgagaccagcctgggcaacatggtgagaccccgtctccacaaaaaaatacacaaattggctgggtgtggtgctgtgtgcctatagttccagctactggggaggctgaggctggagaattgcttgagtctgggaggcagagattgcggtgagctgtgatagagccactgcattgaggtctccattattgtaaaattgtttcttccttcaattttattagtttgctttgtgcattttggagcccttttttttttggttcatatgtgtttataattgttacatcttcttgtgatttgactctcttacgaacataaaatgtttttctgtaacagtttttggcttaaaatctattttgtgtggtattattagtatagccaccctggctctcttttggttactatttgcatggattatctctttccatcttttcactttcaacaaatttgtgtctttgggtctacagtgagtattttgtgagttgcatatttggattatgtattacattattaaaaaaattgattctgccgatctttccattgatgagattatttacattgaaagtgattactgaaacagaaaagttacttgaccgggcacggtggctcccgcctggaggtgaggctgcagtgagccatgatcgcaccactgctcttcagcctgggggacagagtgagattgactcaaaaacaaaaaacagaaacttacttatggttggactcacgcctgtaatcctatcactttgggatgctgaggtgggcagattgcttgagcccaggagtttgagaccaggctgggcgacatagcaagactcctgtctctacaaaaaatagaaaaataagctgggcatggtggtgcacacctgtagttccagctactcaggaggctgaggtgggaggatcagctgagcctgcggaggtcaaggttgtagtgagccgtgattgtgccactgcactccagcctgggcaacagagccagaccctgtctcaaaaaaaaccaaaaacaggctggatgcagtggctcatggctgtacccagcactttgggaggccgaggcgggtggatcactagaggccaggagctcgagactagcctggccaatgtagtgaaacctcatctctactaaaaatacaaaaaattagctgggtctggtggtgggcgcctgcaatcccagctactcaggaggctgagaatcacttgaacctgggaggcaaaggctgcagtgagctgagaatgaaacactgcactccagcctgagttacagagcaagactctgtctcaaagaaaccccaaaaaagaaaaacagaaaaacccacacaccaaagaacttacttatgtcatcctgctgtttagtttctacataaagtgttttgctcctcagtaccttcttttgtgtttggttaatgatttatcctgtaatattttgatcctttcttagttccttttctgtatatttttaaagttttgtttttagtggatactatgaagatttcagttaacatgctgagttctaagtctagttcagactgataccaactcagcttcaatagcatacattaactctgctcctttctctgtcccctagctatattgttacaaattatgtctttaaacaattagttcctattaacatagatgcatattatttcatgcatgtttttaaatcataaaggagaaagaggaataacatacccaaaatacaataatactagcttttatatttagctatatagttgcctttaccagtgatttttattttttcatatagctctgagttattatcttgtatcttttcattttagcctgaaggactcacttcagcttttttttttagcccgagtcttgctctgttgcccaggctgcagtgcagtggcacaatctctgctcactgcaaactctgccttctgggttcaagtgattctcctgcctgagcctcccaagtagctgggattacaggcacgtgccatcacacacagcaaatttttgtatttttagtagagatggggtttcaccatattggccaggctggtctcgaactcctgacctcaggtgatccacctgcctcggcctcccaaagtgcagggattacaggcatgagccactgtgcccagccaagcattctttttcttttttttttttttttgaggtggagtttccctctttttgcccaggctggagtgcaatcgggtgtgacctcggcttactgcaacctctgcctcccaggttcaagcaattctcctgcctcagcctcccgagtagctgggattacaggcatgtgccaccatgcctggctaattttgtatttttttagtagagacagggtttctccatgttggccaggctggtctcaaactcccgacctcaggtgatccacccgcctcggcctcccaaagtgctgggattacaggcgtgagccaccacgcccagaccaggccaagcattcttatatttttattcatttattatttttttagtgacaggttcttgctctgtcaaccaggctggagtgcagtggtatgatcatacctcaccgtaacctccaacttctggtctcaaacgatcctcctgtctcagcctcatgagtagttggaactacagatgcacaccaccatgcccagctaatttttttaatttatattttgtagagacggggtctcactatgttgtccaggctagtcttaaactgctggctgcaagcaatcctcctgtctcagcctcctgagtagctaggaccacaggccagagccaccttgtctggctaattatttttattttgtagagatggggtctccttatgtcgcccaggctggttgtggactcctggcctcaggtgatcccacttcagtctccaaaagtgctgaagttacaggcatgagccaccatgctgagcttccccaaccctgtttttttttttttttttttgagatggagtcttgctctgtcgcccaggctggagtgcaatggcgccatctcagctcactgcaacttccacctcccaggctcaagcaattctcctgtctcagcctcagtcagctgggactacaggtacatgccaccatgcccagcacaccaccactgccttctatactccgtgatttctgataagcaactgttagtcttactgaagatcccttgtacaggatgaatcacttatctcttgctgcttttctgtctttagctttctacaatttgattataatgtgtgtcagtgtggatctctttgagtttatcctgctttgaatttgttgagcatcttcaatgtgtagattcacaattcccatcaaatgtgggatatttttggtcactatttcttaaaaaaatctctctaggccaggcacagtggctcacacctgtaatcctgcactttgggaggctgaggtgggaggattgtttgagcctgggagttcaagactggcctgggcaacatggtgagaccttgtctctccaaaaaatacagaaattagctgtgcttagtggtggtatgtgctatagtcctggtgccatattcccagctacctgggaggctgactatagctggtgctatagtcccagctacttgggaggctgaagggggaggattgcttgagcctaggaggtagaggctgcagttatcaatgagccatgagatcacaccactgcactccaatctggacgacagagcgagaccatctcaaaaaaaaaaaaaaaaaaagatagggatgtatctgcatgactatggattaggcaatggtttcttacatacaacctaaagcacaccaaccagaggaaaaataaattatgctttctcaagattaaaaaggagactatcaagaaagcgcaatgacaactaatagattgagaggaaatatttacaaattatatacatgataaaggtcaattacctagaatatatatacttcaaagactcatttagagacagggtcatgctatgttgcctagactagtgttgaccttctgggctcaagttatcctcctgcctcagccttctgagtagctgggaccataggcctatactaccacaactggctgtggagtatataaagaactcttaccactcaataatgtggacaaaacccaatttaaaaatgagcaaaggctttaaatagaataaaaatgaaacatttaagattgttgaaagtggttgcctctggggagtggaatatggtgaggcagatgtctggattggaggggacgagctattgtgaacaataaaccttgtatcactatttggctctctggatcacagttcacaacaagggatgaatttgctccacaggggacatttggcaatctgaatatatttgtcattgttataactgaggggtcttcctgacatctaatatgtagaggccagggatattactaaacatcctacaaggcagagagagcccccataacaaagaattacatagcctaaaatgtcaatagtgctgaggtgaaaaattgtctaaagtatgtttgaggctgggtgcggtggctcatgcctataatactaacactttgggaggctgaggcaggtggagcacctgaggtcaggagtttgagaccagcctggccaacatggtgaaactccatctctactaataataaaaaaattagttgggcatggtagctcatgcctgtaatcccagttacgtgggaggctgaggcaggagaattgcttgaacctggaaggcgggggttgcagtgagccaagatcccaccactgcactccagcctgggtgacagagtgagatttcatctcaaaataaataaataaacaaatgaagtatgtttgataaaaatacaaatacaagtcaataaaagttatgttaaaaaattaaaaaatcataaaacaatcttttgtacaatatccacagatttacttttctttctttctctctctttctttccttccttccttctttctttcttgcttgctttctttcttttttttttttttttttttgagtttcactcttgttgcccaggctggagtgcaatggcacaatctcagctcaatgcaacctctgcctctcaggttcaagcgattctcctgcctcagcctcctgagtagctgggattacaggcatgtgcctgcttagtgggggtataagccctccttaccaagtagagaaaaaggggagaaaatcacattgctaaagcaattgtgttaagccccatattatctttacttgtggaagaatgcagctttgacctattattcgacacttagcacatataaaattttaggccttagctttcagttcctcagatcgtagcaaattgaagtgttaggctaacaaattagcttacaggcaataacagaaatcactgactgcactactactgacggctacagtaagatctctgataaaaacatgttaagtgatgctcactcaaatccgtaaaggtgcagaaatactcctctcaaacatagtaaaaataaaaacaatctaattatcttgtatgtcaattaaatgaactatggtatacctatgcaaagtactaaacagccattaaaaaggataacatatgcatgtaaattacttggaattatcacaaacatacatatggaaaaaggcaggtttcatacaacatgtataacatgttcccacttacaattttctttctcttccccattctttctccccaccatatatatattgtttataactttctatattatttcaactgtataatagaaactcatctttacaaaaagaaaaacacaactttaaaaatggttaaactattaggctggatgttgtggctcacacctgtaatcccagcactttaggaggctgagagtggatcacaaggtcaggagttcgagaccagcctgaccaaatggtgaaaccccgtctctactaaaaatacaaaaattaaccaggcgtgatagcaagtgcctgtaatcccagctactcgggaggctgaggcaggagaatcacttgaaccctggaggcggaggttgcagtgagctgagattgcgccagtgcactccagtctgggtgacaaagcgagactctgtctctcaaaaaaaaaaaaaaaaaaaaaagaggttaaactattaaaccattatgtccccccataaaataattaaagttctttctaaggactgtactcaattcttcctataaattttactttttagtcgacggaatcagtatactgtaatgtttttctttaactcaggggcccaaggcctagataatcaacttctttgaacaagatgtgatatattggatacagggctggtataagacaactttgaaatgttcaaggactgctttttataccccaaccctctccacctcccacctaatctgtaactctatgtcttagcacccttcccttagtcaccttaaaaatctcatgaagtcaacaaggacaacaaaaaacttaaaaacagaaaaaatctcatgaagtctaacctacccaaacctatccttcatgagaagtctaaccccacacagcacttggaaggattaatgccatattctagcctcatccactgacaaaagggctctctggtgctctccagctcctgtttgctcactttccattcctttagtgacatacctctgctggaggtcagtaaaactttgtttaaccactccttttctcccaatgtacaaatgacaaattggtcccgaatctttctagaggcatctacgaaagtattatgcttgctttaggattaagtaagcttgttacctcaaacaacaattccaactaggctggggcagtggcttacacctgtaatcccagcactttgggaggctgaggcaggaggatggctcgagcccaggaatttgatacaagcctgggcaacatagtgagatcccatcttgattaaacaatatattttaaaaacaaaaaagctggctgggcacggtggctcacgcctgtaatctcagcactttgggaggccaaggtgggtggataacgaggtcaagagatcgagaccatcctggccaacgtggtgaaaccccgttgtagactaaaaatacaaaaattagctgggcgtgatggcacgcgcctgtagtgccagctattcgggaggctgaggcaggagaattgcttgaacctcagaggcagatgttgcagtgagccgagatcacgccacggtgcaccagcctggcgacagagtgagactgtctcaaaaacaaaaaacaattccaattggagaagggctctggcaagtggcaagtctgaagcacacagtttgtaaatcacaaacatataatgataaaatccttctcaaaaacagtctatacatgttaaacatgaaacagcttcacccacccaaaacaaaatcacaaggtatcaattattaggcttactagttttctgctccatacaaaactaatgtattgggatgcacagattacaagtagctcctgaataacagatacgttcttcttttttttttaatttttatatttttgagacggagtttcactcttgttgcccaggctggagtacaacggcatgacgtcagctcactgcaacctctgccttccaggttcaagcaattctcctcccttagcctcctgagtagctgggattacaggtgcccgccaccacgcctggctacttttttctatttttagtggagacggggtttcaccatgttggccaggctggtctcgaactcctgactttaggtgatttgcctgcctcggcctcccaaagtgctaggattacaggcatgagctaccgcgactggcctaacaggtaaattcttatatagagagcacggtctgaggcagaagttcatcttttttaaaaaagcaacttttctaacagcatgtgactatagagtaggagatgaaagggtaattttggtgcacagagatataaggggatgagaagggtggagacatcagggtcctgcagaactttacataggtgatatttacactcacacaagggaatgaacaccgacctttcaaaagcttttccaaaaacagaagaggaaggaacactcctcaactcattccatgaggctagaattgtctggatacaaagactagacaaagacatcataagaaaaccatagatcagtgtcacttagaatagcattaaaaggaatacaatacttagttgtaagacttctacaatgagaactacaaaacatcattgaaagaaatcagagacctaaataaatggaaagacatctcatattcagcattggaaggcttaatatggttgagatggcaatactggtcaggtgcagtggctcatgcccataatcccagaattttgggaagctgaggtgggaagattgcttgattccaggagttcgagaccagtctgggatacgtgatgagaccatgtctctacaaaaaattaaaaagttagccaggtgcagttgcgcacgcctatggttctagctacttgggagggtgaggtgagaggattgcttgagcccaggaggtcaaggttgcagtgactgctgcctggtactccagcctgggtgaaagggcaaaacccttttggggagggtggggaagatggcaatactccacaaattggtgtgcagattcaatgcaattcctatcaaaatcccagcctctttttttttgttttgttttgttttgtagaaatttacaagctgatgctaaacacacatgtgataggatcagggctcaggctcaggtctgagcctcaatctgacactctctgtggagtgtcaggaaataacagataaatagcatcgaatttgaaggtttgccgagaagtgagagaaaaaactccctttgcctgcctcctaggcttcaaagctgtctgggccaagacgtcaatttagctgcatcatgggtcaatgaggcctttgcgaattaggcaaataaatcaagttactagagtttaagctgtgttttctttcagtattccaatgaatcactttttgacctttggaattattaggtacttgtcaagactgataaaatttagctggagatattgcagatatgggcgataaatatgactgaataaagtctgaaaccattcaagactataaaatgtgtttgagatttaggtgaggaggaaagaccttttgaaaattatgaaggctattaacaggctgaacatgacttcaattcaccatatctcagaatcggtaggtactcctataaaagtgtgagtgagatagttcactcatgttaataggctcctcgtaatgatgcacaaattcacagtagtgctgggtatgcggcacgtcaaaggcccaaatgccttttattatgaaagacaggccaaatctagtcaagttttagagttacctatacttactgtatttctatattaggttatttcatgacatttatttcatgacttttttcctaaaaatgaatctgaatagctttatttcttttctctttcttcttgagatgtggtcttgttttgtcacttaggccagagtgcagtggcatgatcacagctcatggtagcctcaacctcccaggcttaagggatcctcccatcttagtagttgggaccacagccatgcaccatcacgcttggataacattttcattttttgtagagacggggtctcgctatattgcctagggtggtcttgaacttccgggctcaagtgatcctcccacctcagcctccaaaacctccaaaaatgctgggattacaagcaccagccaccatgcccagactttatagtttaatttcataggcatttgtccatggtgggggaaatgctgagaaagaaagtagagaaaaatacactttatttcctatttaagtagaccttattttgtttaactatactgatactgatagggcaagtattatattattaagtaactattaacattctattaactatactgatagggcaagcattttattaaataattatgtatattctattcaaacaaattagaagccttctagattaaaaatatatgtatagaaaggtttaaactgcctgaaaattagaaggtaaatgacaaatatttacatatcataggaaagaatgttcagatcacacacaaagaacatataaacacagataatagtaagatacgaagacatcaagcaaacgaagatcagtgtcttcaaaaatgttgtatgtttggcaaaagctcctatcacaaatagtaggaggccgggcatagtggttcatgcctgtaatcccagctctttgggagtctgagatgggtggatcacccgaggtcaggagttcaagaccagcctgaccaacatggcgaaaccccatctctactaaaaatacgaaaattagctgggtgtggtggcacatgcctgtagtctcagctacttgggaggctgagacaagagaattgcttgaacccgggaggtggaggagattgcaccactgcactccagtctgggagacagagtaagactctgtctcaaaaaaaaaaaaaaaaaaaaagatttttttagatgttcccactttatgccaaaatctatgtggctacacataccaataaagcccttctttgctagctccatggtgaacctccttgtgatcttttccagttcgttatcctgtaaaataagaaaacaataaaaataaaaaaagatacaaaaatcgcttgagattatagctagcatcttattttctatttatagtacattttcatgtcttctcatccttagaacaactcataaggtaggcaatgccattttaaaggtgagaaaataagggatcaaaaaagtaggttataaaaacaagatagtagaaccaggactcaaattcccattctattaattccccactgaaaaatataccaaatcttaattaagattaattgtaatataattatattccatctaaatggtgaattttaaagagaataaaaatcatatctgtttatgtttgtatatagataatttagtattatgtaaagcattgtgacaaccagtttgaatttacttggaactgacaggataaaaagtaaggtttttattggcttagttaagatatttgtcactagcatgagatcctgaactaaaaacttcagatcacagtactacttttcttctttctttttgagacagagtcttgctctgttgcccaggctggaatacagtggtgaaatctcgtctcactgcaacctctgcctcctgggttcaagcagttctcatgcctgagcctcccgagtagctaggattacaggtgtgcgtcactatgcctggctaattagatcacagtgattcttttttttttttttttttgagacaaagtctcgctctgtcacccaggctggagtgcagtggcatgatctcggctcactgcaaactccacctcccgggtttactccattctcctgcctcagtctcctgagtagctgggactacaggcacccaccaacacgccggactaatttttcgtatttttagtagagacggggtttcactgtgttaaccaggatggtctcgatctcctgacctcgtgatccgcctgccttggcctcccaaagtgctgggattacaggcgtgagccaccgcacccagccagatcacagtacttcttaaatatgggtataggtgtctaataatatgaagatattaattaccttttaaataagaaaataataatacaaaaagcaaaaaaaaaaaaaaaacaagactcataaaaacaaaaccaaacaaagcagaaaatgataaaggatatagatattaagtaggtgacctttatatggcaaaacactcaatgagttaattctttacttttttcattccatttgaaaagcaatggggactattgatttcactgatatgggggatacagagaagcccagtaatttcaagtccttcataaatgcactgtgtgcacaaatatcactttgaggccgggtgcggtggctcatgcctgtaatcccagcactctgggaggccaaggtgggcagatcacctgcggtcagtagttcaagaccagcctggccaacatggtgaaaccccctctctactaaaaatacaaaaattagtcaggcatggtggcatgcacctgtaatcccagttactggatcaaggagaatcgcctgaacccaggaggcggaggttgcagtgagccgagatcgcaccgttgcactccagcctgggcgacagagcaagactctgtgtcaaaaaagcaaaaacaaaaacaaaaacaaaaactttcatacttacggtatagttcttgggatagatcttaacaccagctttagcacccccaaacggcacatctgaaagagaaggttgatggttgctattccatataaaggttaaaaaagtaaaatgacagaaagcgccacacaatattagaaaaacgtgtgatgctttaagcttgaatttctgaaagttcaagaaataaacctaccatcgttttctcaactgtactttaaacaacatttattgaacaggaattgttcaataaaattggctagccaagttctaatatatatatataaaacataataataattaaccaataataataaatacttaaacctctaatccatagattgcaaatgcaacaatgatagcttattttcttggggaacaagagtgggtggggacagagggaacgggaacaggacttttgctgaaaggagggatgacaggaacacagggctgtgggtgaaaagaagaacaaatagaagaaacagcagagaaggcggctggctggggtggggcgggcgcctccctggccctgctccaggactcaggactgggtcccgcctgggccgcccctcctgccaagcccctggcctcttcccagggtgactggcccactcctagaccctaggacatctgaagggcaggagtcccaacggcctgagagggtatgggccaggagcagcaggctgacccatctgggcccaaaagccacctgtgtttgggggctggaatgctgtctagaaagagggcgccctgggaaaggggcgcacgagagtttctctcctgagaggcccccatgcaggtcgggtcaacaagggggctttatctgccttgaggcagcgctccctaagtgaagcaggcctaccccagaagcacgggggcttggctggcgcctgaactccctgtgcaaggcagcacctgctcatggagcccctcagcctgcaggtgcacacctggtttccaagtcctgcctggggccttgctaggtgggggacggacctggaacaggaccctaagcccaccccctcctcatacctggcagtccagggctccccgcccagtggagccagcacaggctagccaggcccccctcctgcctgacccccggaggccaagctcctctcctgcagtagtgccgccctgccagtcaggtagctctgggggcaggggcaaaggagaagggagggccgcagccctctgggaatggcctttctgaggcactcagtggctggactggggctctggcaggagttggggcattaataacacccccatcctcccctgggctccgcctcatctgaccctccagaaccccctgccccaagcccctacacacactgttctattcctcagcccctctcaacgccctggcaccatggggcccaatgcatgtcctcccctgagagggaacagctctggggcaacgggcagcggggtgccctccctgccaccaagatttggtgcctagagctggtggagggctggccgcacctctctggggcacaccaggtcctgctcccccagcctatggctttggggcggagcccgaagggagagagcaggggcggtgggtgggggaagaagggggtttctgcggctcagtttgtggcaagaaagttttttttttttttcaactttctcttgtgtaaaaagttcacgaaagctcggcagcctctgcaaatgtcagcagtgttttctggggcgggggatcagggaggggccccaggcctggcctgcaacttgcgactgaaggtggcctcttattgcttagaaacgtgtgtttcggtttaaataccagacagtaaaaatagagctcgaggaccacccgcactgttgccaaatcagtgccagaatgaacagcttaaataaataaaaaatcgaaatatttacttctggataaaaatcgcagtaaaaccatttgcctttctttgcattatatataatatatatttataactgcccagctgcgggcggcggagccgagggcagcggaggggtcaggacatctcgatgacctccacgctgcccgagaagctcccctgcttgcccagggcggccagctcctcgccgcgcgcgcgcccctccaccatgccctcctcgaactccatctggcagctgcagcacttgaagtgcgaatccggggccagctcgtctgaccagctggtccgcgcgtcccgggctcagcccttgctgcctcccgccgtggcaggtcgctgcagccgttgggttccggggcgcccgcccggccgaagggcgcaaacagcaccctgcccggcccttgcacgccctcggggctgaagcaccgaggacgcttcagggagtcgagcggtggcgtccaggctccggggctggccggctggccagggcccggcagccgcgtagccgaagttcaggccgcgcgcggggtagcgcgccgggccgtgggcgtgcctgggcgcggcgtccgggcagggcgagggcaggcccagcatggccccgactggctgtccagctttcagagagcttcggggcctcgccggggtcgctgggcccgggccgccgggccgcctgctgggggcgtaggccgacttgatgtccagagagaaggagggcttgaggcggctggtgtcctgcaggtggtccgaggagaggcgcaggctgcgcaggccctgctgcagcgtgctggtggccgtggggggcgccgggggcttcctgcccgcgctcgggccgccctccctggcagctgcactcctggtggcagcggtctctgaggtaggtggtggcagccatggcagtggggccccggccgcagggctggggggaggctcctgcattcctgagggggtgcccgcgtcgccctgcacggcggccagcagcttcgggctgctctggtcctccagcagctggcccaggaagttgaagttgggcgagatggacgggcgctggtccttcacaaacctgtaggcgtcttcggaggacatgcccatggtcttcatgatgtaggcgatggcgatagtggcacagcaggagatgccggccagacggtggacgatgacttggcagctggacagcttggctttatcgacgaactcgatggacttgtccagccagggcagcagcttttcacagtagttgtcgttgatggggacccgcaagaagtggctctggtagatgaagtcaggcttggggcaggagttgctggcatagaggacgtagcttattccattctgcgtcatcagatccttgttcaggacgtcttcctgcgagcccaggtagaggtgaggcaggatgagggtcaggcccacgctgggcacgagcaggcaggactgggagaggctcatgggtagcagggcagcaggctcacccttgcagaggtcggggaagcaggaggagaaggtggcgaagccccccgtgatgatggccatgctgtggaagcagccggccacgctgtggaagcagccatccagcttggtcagcaggatggagaggaagctgtctgcggccgcgtgctctggtcatagaccaccacgtcctgtggctcagtggcctccacctggctgcgtgcggccggctggatgaactccacaatggtcaccttgcccttctgcaaccgccacttcaccagcttggagcagcagatgttgacggagctgagcacatgccagctgttgtactccaggaaggagtgactgtcgatgaccaggcccccccaggcccgccccgcagcaggctggccagcttcttggcgtccatcaccttcctggggagccggtccccggccatgatggggcaatgggtcttggggagggtgacccctgaagtgaggaggggctgctccgacggcccaagtgtggcctcgcactgggaataacctagcacatgatgccggaccttgcttgcgctcacctcgggggtgctccgaggacccgcaccgcgctcaaggcgcccgctcggctgtgcagtccatgggccaggcgggggcccgcgcagctggggcgggggctggggctctaatatatatttaatcagtgctcttcaccactttaaaaagataatagcttatttactctccttctactataatttggtcttatttatagaatatgttgaggaattgaaaacaaagatctagacttaaaatccaattagctccctcccgtaaaaaaatccctcccgtaaaaaaaggctatatcttaatttagagtaattgagaaatgatgcaggtcttaaagagtacaacttaaaaaaaaatcagttccgataaggtatatttctatagcatcttaacagtaacatgtttgtaaacatatttccccagagttctcattaggtagcaagaaaagcgatcacctaccaaccactgcacacttgtatgtcatcagagaagccaaagcttttacttcatctacactcacatcagtgctataacggatacctggtggtgttttttaaaaaatgtgttggggtgggtgagaaagaaggggatatatttagaacaaatttcagtaagtttcaaaaaagaaagctacaaattgaaaatatccactttttacattttatacccaagctatgtccaaaaacacttgaagcagctcatacatcagaacaccataaaaaatgaatataaaacatttaaaaaagctgctaataacagtaactatgatttcacaagacaaaaatcaccctgcaatgaatttctgtacactttccagaaggcttttttatgttccttttacctttggtttgcgtgacctggttgcagggagttcaagaattcagcttgcttttttagggggtgggtaggggtgggaaacagggtcttgctctgttgctcaggctgagcgtagtggcacagacactgcttactgtagcttcaacctcctgggctcaggtaatcctcccacctcagcctcctgagtagctgggaccacaagtgcatgccaccatgcccagctaatgtttgaattttttgtagagtcaagatctcaccatgttgcccaggctggtctcaaactcctgggctcaagtgatcctcccaccttggcttcccaaagtgctgggattacagggatgagccgctatgcctggcaagaattctgctttctgataattcacaaacatgggcaatgaatagtcaccaggttcaaaataccgtatgtctaaactgaggttttggcttcaaatgggtatattgaaagagatccttacctgttattctcctcacccactgccaacctctttcaatttgaagatgagaaagccattttcccttcctgaggttgagtgattcccttcaccacttctgcaagaaggggaggtagccaagcagacaggtactagtgcccctgtatctagtagccattacgtgttggtatagggtatacagaaagtggcgatgcccactgctttggctttggggggtcttggtcaattacccttccaagttttggagtgctaagccacctttctttctctataatccattgcttctcaatcccaaggaggaaagtctgagcagggttgatgtttgactgcacagtgcttggggcactgggtgtttgtgtgtgaagtttacccacaagaagctgcagcattttttctaccctcccactctcaacagattcagcccctctcgaggggctgggtacgatttccactgggagtcacaggtaagtaatgggagcctcagggacagctcttttaaagaattctgagaataaaagtttttcagatagaaaatatacaatatctcagggactggcagtttgagagaacttccctagtcaattttaaaagctagcttttttatatgtttctgaaaacatcaaccttaatattaacaatattttaagagaatgtatttattatacagatcataaagagcatattctaagctgaacatacttatttggtctactgtaaaaacaaatcatatttagaggagtatgtgcttacaactatatcttatacataattgattctcaaattgtgaaataaatgtactcattaaacttttagaatgcaaaattacaggtaatttttctagcacacagcagatatctgtatagctgactcccccatctcattcaggtctctgttaaaaacttcattctgagaggctctccctgaccactgtatttaaaagagcacctctttctcactcccactttcctgcctctcctaccttacttgtttcttcatatcgtttattattactgactttgcattatacatgtgtttagtatctggcttccctacctggcaagttagcaccacgagggcagactttgttatgttcactgctttaattccttgttcctaacatagaaaatggcatacattaggcactcaaatacatgctgaattaatatacgaatattctgactcttaaaatttaaaaaagaaagaaaagctatggccacaaaaaattttgacatacatgtacttttaaataacttaccataagcctccatacatatcatgaaaggactcagtatacaacattggggatgggggtgatggggagatgatggtcaaagggcacaaagcctcaattagacaggaggaataagtttctttgagataaattgcacagcatggtgaatacagtaaataataatagattacacatttggcccaacatggtagttcacgcttgtaatcccaacactggaaggctgaggtgggaggatcacttgagctcaggagtttgaaaccagcctggccaacatagtgagacctcatttctacaacaacaacaaaaagtactgcacatttcaaaatcactgagtaaatttcagatgttctcaccagaaaaaatgataattatttgcaattgtttccagtagtgaacaggttaatcagcttgacttaattatgtaatgttgtattcataaatcataaaattactttgtacctcataaatatatatctacaatttgtcaatttacaatttaaaaaataaaaaaattgaaaggctttccagtcagatgaggcccacagaaaaggaaaaaaaaattgtaaataatattaagatgaatcctttgtatcttaaaaaaaattgagttgggtgtgggggcatgtgcccgtagtcccagatgctcaggaggctggggcaggagaatcgcttgagcccaggagttgcaggctgcagtgagctacgctcaggtcactgcactccaccccagcaacagagccagaccttttctcaaaaaaaaaaattgttttaacactaaaatgtgcttttcaaattattcaaaatgcttctaagtaataccacatatttaatgataactacactaagccaggaaaatagtcaggcgctgtgcccaggtgacccagcctgcaccatccgcttgcatggaggggtgctaacgccaccctcctaggatgggcgtcacaactgcgaggaacatcgcacatggggaatctggcacggtgccctgcaagtggtcaaacaggcaaatctcaactgttaccactgctataacaagtattacaaagcaatggcatgtaacaaagcaattaaaaagtctaaactgacaggagtttgaacaaatgacttaaaccttggtttcattacttctacataaattcacgggaagtggtaaaacaatgtattaattaagaactagtatttcttctcccacacataaatcacttttttcattgctcttttagagcctgtggaagtcatcactacattatttttaattttcctggctttcttaagtggaggaaaagttattttcttttaacttagaaacttaaaaattttaacttgcatttagcagggagctaaaaactgctggaaccaatgatattcataaatcaaacagaagcattcaaatggcaagcctaatattctagaaatagatgttactaaaaattaggaaccagacctctccttccacacaacagtgtaaacagaatgtccattttatcataagtcatggaatgatatgggtcagaaactgtgtgtgtataacaagagacatgttccgctggatggaacccaggaattcttgtttgtaaagttaaattttctttcccagctacacccatttagagagctcaacctgctaaacagtgaagagaagcagtttcacaaattacctctcacaccacaggcattttctgtaggctatgaaccaataaaggttcagtgaatggaagtacaggaggagctataaagaaagtaccagcttagtggaagaagccctggagccaacagagtagggacaaggaggggatagaagtgaatgcaagtgatattgcctgggctaaagaagacacattttcattttaaatttctagttaaccagtgatacacacgtttttaattctagaaattggcaaataccgagtactgggctacctaaactgttaatctgaaaaacaaaaaattttaaagtgcacccattaataaaatactctgcggcaatacttgagacaaaacaatctccaataagacacaatgtacccacaaacagaaaaagccagttactcttccttctctgggtttggaaaccaaagataactatcaaaaatatactgtcacctgaaaattcttaactacattctaaggcacattaagagatttaagtaaggaggctggatgtggtggctcacgcctataatcccagcactttgggaggccgagctgggcagatcacttgaggtcaggagttcgagaccagcttggccaacatggtgaaacccccatctttactaagaatacaaaaattagctgggtgtggtggcatgcttctgtatttcctagctactcatgaggctaaggcggtggttacagtgagctgagattgcactactgcattccagcctgggcgacggtttgagactccgcctcaaaaaaaaaaaaaaaaaaaaaaaaaaagtaagactccaaaaaggaagttactctacttaatggattgggaaaaaatagcacaactggagaatgtgaaggacaaaatgatgtgacatatacatacaaagttctgaaaggcagggaaagcttagccctttttaatgcccattcccattcaaatatactcaatttgaagttattcaataaagtcaaataataggtaaatacatatgcatacaagaaaatcagaaaatcttaaaatatttaatccaaaatgaagcaagaaggatcttatgtggtctgaatattgtcactttttataaaaccaagcctttcctccttcagcagagaaggctgaaggtgaacaggaccaacagagatcaaacaggggcacagaacagaaactagggggaggaaggaagagatgttttattccagaaatggaggaaagtaaattatatttttgtatcccaaagtcttagagggttaggcatggtggctcatgcctgtagtcctagcacattgggaggctgaggcaggagaacttgagctcaggtgtgcaagaccagcctggacaacaatagtgagatcccatttctacacacacacacacacacacacacacacacacacacacacatcttaaaaccctgttagactccattgatgcattactagtgtctgggatcaactgagtctttggtcaactgtgctagtaggaatgaaggtaaatacttttaacaaagagcaggagtccacggctggctaagctagatagtgaatgggctcggtacacaggtgtcggccacagagctgatgccattagacacatggcctaaaaatcaaggccaccctgctgacaaagtaatctgtgcatccagctcaccagaggaaactgaagacacaccacccatgacgtttattatttatctatctcagtaaagctggaggaagggctagggacagaatgacgtatgtactacaatgggaacttttaaatcattccttctattctgaacagaaaccaactaaacagttattttatgttaactggtatccagatgtttccaaagaatattagtgaaatgcagacatctgcaactatacacagcacaaagcactgatctgatttttaacttaattaccacagatattccttagtatgctcaagtctaatgagcagtgcatgctaagtttctctaggagaaataaaaatcaaaagcagaaactagcttaagttgctacagtgatgaagaaaacaaaccagctcattactttaaaaaagattcagtgaaaaccacaattgactaagcttgaatttttcttccttttcctagctgactcaaaagcaaacacacaaaagcctccagctagagtcactgttttttttttataattaatcattaacaaaacatttatgaaaatccaaatggttttaaaattacttcaacctggttctcttaatagggtttgatttattcatcagaaatctgatttccagctgtactctctcacttttcagcaactatttataaaataaccaagagttctaccacaagcacagaacccccagaaaagcaaaaaggcctcagaacaactcttaatattcatacgttaacactcttgccacttactcatcagatcatattttttcacttaatattaatgtactttctaatccacaataatgtagcgtaacttaatttaaaatgaggagaggaaggttagaagcagggaggaactattaatgaccacccgtaagtaatgaccatctgaaatactatgtctcagataaaaattcagacattcagcatggggaaggagcactgcatataggagctaagaaaaagtacacactttaggctgggtgtggtggctcatgcctgtaatcccagcactttgggaggctgaggcgggcagatcatttgaggtcaggagttcgagaccagcctggccaacatggtgaaaccctgtctctactaaacatacaaaaaaattagctgggcgtggtggtgcacgcctgtaatcccagctactggggaggctgaggcaggagaattgcttgaacccaggagacagaggttgcaatgagctgagattgcaccactgcacttcagcctgggtgacagagtgagactccatctcaaaaaaaaaaaaaaaaaaaaagaaagaaaataaaaattatactttaattgctttagcagcatcaatgtactgttctgtataaagtaggcaaataccatcttagatttttaattcattgtctaaatcttttattttaacctgaataaattttgaaaagacaactaagctttctgggaagcaaatgtttagctgatattggaaaaatataatgtagtgacagatcaagaaaaaaaaggaaaaatactttttttcattaaaaatttaaaattataatacatatgtatgtatttctgtcaaaattgaaatacaaaaagaaagctgaagactcccttgactaccacttgtgaccccagtcttctctaagtgtatatccttccaaatcatattccctgcagttatatatgtacatatccataaaacatacagctttcttttatgttaggtatttaacttacagcctgatggatggaagattatgcattaaaagggggatcttgttaatttttttggtagattcttttattctgatcttgattaacagtaaacttagttgcactttcacaccaaatacctcttggaaacggaaatgatgctagttaaaatggcgaatataaacttggacttagtaaaagataacagtaacttgttattaaaaactttcaaagggataaaggcttgaaacctcaggtatccagtttcatgtaaattacttacaagtctaggtgatatttgagatgggtcttaagagaggaagaggaatcctagggagggggaggcgaggcatggacaggcagaaggactgcactgtgcaagggcatgatggagagaagtacatgcctagttttccagttttcctgaggataattttacaccagatcttctttattttaaaaatccaatcctttttcttaataacccctgtctgtccctgataccaccattttttttctaccagtctctcaggctagaaattttgtagttatctttgcctcttctctccatcctgtaaatcctacctgttgggaatacattactgtcctttcttcaaaatgttttatctgtcttttctttttcattctctgctattaagtataacttcattctcagttccactgctgcctagctttctgtgtcctgctaggttcatcattatccatccaacaaacataaaaggaaaactgtttctactcacacacttctgaaaccaaatgtgtgggttttccacactaagcagttctccagttctctctgcagatacaaaccgggtgtcctgcaattcacttctgaattgccatcaactaagatcataagactgctgagcagttggtttgagagggaagattctgagttctgtagggcatatcactttggaaatgtccattaaacatccaaatggatatgtcatggaggcagctggagttcaggttagaggtctgagtcactgataaaactttgggagttgttggcaaatgatagcgtattggtcagagtccgattaggaaagagaagccacacagtcatttgaacaggaaaagtgtacctagggaattgttaattgcaacagggaagtggagtaaccaggcacagactagtaggaagtataggaggagcagctactagtctagggctcaggtagagaactcaggagagtcctcccctcttagtgccctgcccctgcacctcatcagaggaacccagccatggccctctgcttgtcaggagagtcaccgatgctataccactggaacttactagaaatacttccttaggtgctggggaaaggagcggtgtctcagaagagttactctataataaaactgcctggagctggtgagaggagtgggacctgctgggcactggccactgtgtccctggtgaagtcaaccgcctgcaggagccaggcgagggagcataggagaaccagtagcaaagacagctttcacctacaaagtctctccattgctctagataggaggtggtggtcagagtgggatactgtgagggttgcagtccttggacctgacaaggtctaaggtctgatcatggagggagggggaagctgaggtagggcagaggacaagaatgggcttcatgagaccaaaaggatgttagaaagattatttacccggctactgacatctccaagaagtaagaggcctagtgtgaagaagttacaacatcctaagctcttcagggataagggaagcatgcgccacgtaggtagcctccctagtgcagcacccagtatatagcctatgcagagtgaatacctgggggctgctgggggtgataacaaggtcactgtgacaggacctgaagcctgggggtctcggtgacaggagtgggcctagttttttgatgtagaattgagccttgcatgcaccggtgggatcatattgaaaagaaaccctccaagactagaggaagatgcatcctctgacaatgtagtctctgtaggcgtcccaagtagctgggctggggattagatgggctccaaggcatttcctcaggtggcaatgggtggatccctgggaaggcaaagctgtgcaggaagaaaatggcaagatgctaccttccctcagggaaagcccctttcccgggagcagggaaggcgaggcagtttaggctgggtcagtttgtccctgccctcagagtctgttggtcccggaaaaagagggccttattttatttatttatttttctttgagacagtgtcttgctctgtcgcccaggctggagtgcagtggctcgatctcagctcactacaacttctgcctcccaggctcaagcgatcgtcccgcctcagcctccagagtagctgggaccacagggaccacagggaccacaggcgccctgccacgacgctggctttatttttatttatttatttatttatttatttatttatttattttttgagagatgtagcctccctatgttgcccagattggtcttgaactcctgggctcaagcaatcctcctgcctcggcctcccaaaaggctgggattacaggcgtgatccaccgcttctggccaaaagagggctatagggcacccccagaacgcgagatctccctcgtctgtcatctttacagaggaggaagtggactcccaatccagccatagtccattcgccccgggcacggtgactccggggcggccagaaccaaatgtgtctcctggcttttgcacggcatcaagtaacccgcgccaggccgcacagctgccctggccttcagcaaggactccgcgagcgaggtgcaagctgctggggagtgccacagcaggagctgaggcagcggattccgagggcggggtggggctgaatcgggagggacgcggacccggtggaacgcactgcgcagacggcgccggcgccagcactcggccgttgacgagtctttcttccagctgtcccctgaaagtcatccaggcggcggtccctttttttctgcctttttgtttccctccggcgagtcggcgcgagggtgaatttccgtttccggcggtgtccaagcggacctaaggagtcgcagttgtgaacaggtttggtgccgcgggctggggtaggcggcggttgggtccgtggctctggggcactgggaagatcgcgagtcgtgcgcatgggaaggtcctcccccggtcctccgggtcatctttgctcccgaggagcggcatatttcgcatctgcctgaggtgtgcccgggggtcgttgggagagtgacgggatgaatccctgcagagagcccggactgggagggaaggtgtcggggagacgtcgtttcctggcgacgtggtcccggcaggcgacttagacctgagccgaatctgttgaccccaaattgtgcttttcccaccaagaagaaaagggagagaaacagtacaagttcggcagtaaaatatagtagagaagcaatataacctctgaaatcacacagctattcagtttcaaagcgttcctagtgcccagctctcctaactcccggccagtgttccttgacatatggtgatatataaagactttctgtttccgctcgtgtgtgtgtctgtgagaagcctctgactcacttctgtgctccagtagcaccctctgcagccttgcaatgtagcccttattgcatggcacggaagatactagtttggatttcctctgccaatcagaccatagctatatccattttctggcacagtggctagcacatcatagacagacacaaacatttattaaacggaatgaatacaggaccttaactgaatgaaatggtaccctgccccgctttttctcaatcaagctgtcagattttatgcagcccgatattccaaaaaaactcacagattcagtgactaccaatttattggccacagattcccaggtacctcagaaatcactggaagggtctctgtaagtccatggggtctccaggcatcatctaaaaccagtcatatctcacacatacagatattgctatttttcaaatgtatgtagatgagctgtaatttagaagttttagagtcaacaggtactaaaagtaatactgcgatcctattggaagttcataaaaacgttttaaattttttattgaaatttaagttctggtttaagttaggaaaccacttcgttagtccagtcgatgtctaggtctgagctgtccagtatggtagccacatgtgactatttagagttagaatgaaattaattaagaattcattttttcagtttctctgaagtacattttaagtaaccacatgtggctaatggctaaatggctgaaaagtacagatatagaatatttccatccttgcagaaataggtactggtgatgttgacacttgagatgaataaaaagtaacttaaccatagaatgtaaccttagcagaggtaactcatctaatttatagcataacagagagaaatgaaattggggatggttaagcagtttctacccttgttcagtgaacaaatacatcatgtcttcataaagaaataaatgaaatttaatgtttttccctgggtattgcctggattgtaaaatgcttctcccacctccttaccccaaccttcttccttgtaggttagagttacttgttattggtaaatagccactatggagactaaggaccagaagaaacacagaaagaaaaacggtggacccaaagctgcaaagaaaaagaagtggcatctgcaggatctccagctaggagactaagaaaatgcccagaagagaaatgccaatgcttttgcagttcagtctgctgtgtggatgtctcgatcctttcacaggtgtgtttagctacagtctgatggttcttccattgaatctttttaaatagttaggagcctctcacaggtgacatttggattcacaagtctagtccagctccaaaggacatggagatgcatgctgtgtggcttttactaaaacgtgagaagacttgccatagaagctgccttgcctccagcatctgcacactggttggcgtttcttgcccaagatacaagaatttatagaatttgattcttcctaaactttaaactgtttctatggtgataagtgtgctttttccctctggatatgttttacaaagttgtaatataaaatacaaaaattacaatatgtaatactaacatagctttatttagtgagtccttatgatattcttagcagtgtactttaaacgttattcaactaaatccttccagcagccttaccagagtaggaatcattcttgccctcattttatggacaagaaaactgaggtcaagaaaacaagttacctccaatcatacaaccagtaagtcggagagccaaatttaactccagagcctctgctcttatctgttatgatgcactgcctcagtatttaccttttggtttttaaaaaactataaaaatcactcataaagcagtcagatttaaggtgtgtttaattttcaactctatactattgaagtcatcttgttacatctttattgaacagcaattgatttggataggggtcagaagttaataattgacaagttacttatatttttatattgtctgttgtactctctataaaatatactaaagtactcatatctgtaattatactaaaaaaaagtctacttataaggttgataccttttactctattttaaaagtgagtttactttttttttcttttttaaataaataggactctggatttgaagacacaaaagcatcatattccagtggttgatggaactccactagagccgccaccaataccggtagtggtgacggggcctccaaagttggaaagagcactttgatataatgcctcattcggaacttcacctggcagaagttcaccgagatcagaggccctgtgacgatcgtgtcaggtaggagatggtgccacagacacagacttggcgtggctgttgtcatctgagggacatgcgtgtgtttgttgttttcttgagtggaacatgttaaatattgtcatatcatgttacctctctcttacttttactaagttagctataacttcataaaaggataagttcccagagataaggatgtgatacataccttatcctgactgctctatggctttgccaagcatgttccttggaagggcctgacaggcctggtcactgcgaacacaccatttaacagacagcacgtacctcctatgtgccaggtgcacatgcttgcccttatgaagccacatgctggtggaagtgcgcgttttctctttttcctatgagaatttgtctgctttgggagatggtgacctttccaagtttgagggaagatgaaacaaacgtccagtggtagaatggcaatgtacactctgaaatctcttattattgcagtaatatagttggattgaggcttttctttatctttggcgcatccatattttattttcctttttttgagacagagtcttgctctgtggcacaggctggaatgcagtggtgtgattacagctcactgcagcctcaacctcccaggctcaagcaatcctcctaccttagcctcctgagtagtgtatgccaccatgcctggctaatttttcttttttttccttttttttaatttttatgtttttgtagagatgggatttccccatgtggcccaggctgatctcaaaactcctgggctcaagggatccacctgccctggtctcccaaggtgccaggactacaggcatgagccactgtgcccagccaatattttcttgatcattttcttattaccttaatttagaaataattatcattgtaaatattctgttgcattatgtttgaggatgtttttagcgatagtgggaatacaggaaattttgatagaggtgaagacattggcctgcagctgaacagcaagatcatggttatcgtggagcctgtctagtcagaattttccctgttttgagcacttttattcatctgggtaggcttttgatattatctaaatttagaacacaggaagaaaaacaggatggaatttattttaccagtttttgcctataaaaatgaacttctggtacactcctgtaaacgtatgtggtgttttactggatgcaattaaaaaatgaaaattaagagttgatggttagagttttttcagggtctttttaaagtaaaattttcatcttttcacttataggtaaaaagcgcagactcaccattattgaatgtgggtgtgacattaacatgatgattgatctggctaaagtagcagatctggtaagtgagcaggggcagcctggggtgctgatggagacttacagcattgtggtaggttatttaccccgtgatgaagggaagagagttttgtgattattaaaaggatcatggtcattatcagggatatagtagatgtgattgaattgatgatgataataatattagtaataaatgttgtcatattaataatacaaatggaatgtgcacaatgaaatgtgttccaaaatctaaaagcaaatcacaggatggagaaaacctttaatgaacacagctaataagagctcattaacattcatacatatatatgtacaaatatatcatagtaagtaccatttcttcttggatccttcctggcactgtgctaactgctttctacaaatttagcttacataaacccttgatacacccttgaggtgagtaggtattatctatagtttacataagatgaaatagagcctcccagcagttaagtaacttgtgtgaagatgggacccttgttcctgatggttctagaaccttcatccttaatgataatgctaaagtaagtacatgaattgcctgaagaagtggtcagagtttatcaatagaaaatttagatagtactcagcgtgtggaaaatgtacatttatggaaatgataatgttcactatctctgatattctatgatcttttacattagcaaaaaaaagaaaaaaagaaaaaaaggccagacacagtggctcatgcctgtaatcccagcactttgggagaccgaagtgggtgaatcacctgaggtcgggagttcgagaccagcctgaccaacatgcagaaaccccgtctctactaaaaatacaaaattagacgggtgaggtggtgcatgcctgtaatcccagttacttaggaggctgaggcaggagaatcgcttcaacccaggagatggaggttgcggtgaggcgagatcgtgccattgcactctagcctgggcaacaagagtgaaattctgtctcaaaaaaaaaaaaaaattagcaaaaaaataagccatattgattaggaggtgtagggtgacagataccttgtttttttcatttttatttagtttttgctagagctacagattttatactttggcctaggaagactcctaaaatataaaggaaaaagtaatacagattttaaagttgtgccattgtaatgtcagaaaactaaataacattcaaattttgaacatgtaatgctactattagtaaaaataagtgtaattaatgtaaagttgtgtaaagattactaaacttgtatacttgaaatgattgaatagttcatagaagtcatttgtttctcttttatttaaaatgtagcaagtttctaattttaaacacatacatattaagagatgcatttacatttttttagttttagttattatggatacataatagttgtacatatttatggggtacatgtagtattttgatagaagcatacaatgtgtgatgatcaaatcagggtaattcagagatccgtcacttcaaacatttatcatttatttgtgttaggaacattttaatttcattcttttagttattctgaattatataataaattatagtcaccctattgtgctgttggacactagaatttattctatctaactgtgtttttgtacctgttaacctttccctctttgtccctccctccctgctccccttcccagcctcttaaccatcattgagagagatgcctatgtaaatcttaagattttcaaaaggagcacacacatttggtaaagcactctaactgtaatgcacggtacacacaatgcgcattttctctttccttgctgtaacctctggtctctcaggtccctgcagacctttatatatatgtatatgtatatgtatatccttccagatacatataaacacacatgccaccctttaaaaacacaaacggtagcttattttatacactgttctatgctttgcttttttcatgtaatatatcttgaaggtgtataatcagtaagtactgtagctctgcctccttctttttaatataacattccattctgtggatgcaccataatttatttagtctagcttatgttgattgctctgctctgggttgtcaaagcctcctgagtacagcagaggcacacacagtacgtggatttgggtgtgtacgtgcgtgtgtggattaggggagtgacactggcttagatggcaaagattggcagctgagggactgtttgctcccttttattcctgaccctacaaccagctgcttgtcccttggcactctggcatcagatgtggtgtgaggatattccacctgttctttgagctggtccagtgttgctggagagctctgcttgctgccttggtctgcagtggcagctgtgctttcctacaagcccaacttcatatattctgtggttttgggttttgaatgtttcctagtttaatcaaggatgggcatttctgtttccattttgtgttatttttagttatccatggaaagatagaaacagaactatctttagtattaaaattacaagtttccaggaatcagttctgaaattattttgcatctttgaagtgtcttaaattttaaaaattggtcttggccaggtgcggtggctcacgcctgtaatcccagcacttcggaggccaaggcaggcagatcacggggtcaggagatcgagaccatcctggtgaacactgtgaaaccccgtctctactaaaaaaatacaaaaaaaactagccgggtgtggtggtgggtgcctgtagtcccagctactcaggaggctgaggcagaagaatggcatgaatccggggggcggagcttgcgctgagccgagatcaagccactgcactccagcctgggcaacagagcgagactctgtctcaaaaaaaaaaaaaaaaaaaaaaaattggtcttatctgcttatattttcttatagactaccattcatcataatctttctgtttttttacttaattctaaactggtagctatttcaaatatttctgagcaattgagttatacaaattaacatacaagttagaggtttccattgtatacttcccagcaaaaaaagattttttttttttttctgtgaggagattgaaagaagaggttggttttctgtacgtatttaatatatttcattgattatcactttcttcccattctttggatgtcagagacctgttatttggcttaaaaatacattacagaaaacttcatttctttaaattaggatttcttaggtaagggccaggttagacccagccttttctgagttacttctcatgcattagaattcttaaaatggatgtttatatcctagtggccttgtcttatggttgccttttagagcaagtcagagggtggtggtttctctgtctgggtgatgcctgtgtagtcatttgatttagtctggagtgggacttttctgtcgagggccagatagtgaatattttcagctttgtggatcatatcttctgcagctacttagctctgcagttgtagtgcacaggcggccatagacaatatgtaaaggaattaatgtggctatgttccaataaaactttagttacaaacacaggtgatgggctggatttggcccgtgggccagttgccaacccctagtgtaggtggtctgttttggtagtttcttcgagaaataatgtgttgtgcttgtaggtactgatgcttatagatgccagctttgggtttgaaatggaaatgtttgagtttctaaacatctgtcaagcacatggctttcctaaaattctgggagttctcacccacctcgactccttcaagcataacaagcaactgaagaagacaaagaagcgattaaaacacaggttctggacagaagtttaccaggtaggaagagaaataattgttagacactaacagtataatcctttaaaaccagactaaagaggccaggcacagtggctcatgcctgtaatcccagcactttgggaggcagagtcaggtggatcacttgaggccaggagtttcgagctcagggcaatatggccaaaccctgtctctactcaaaaggcaaaaattagtcgggtgtggtggcatgcacctgtaatcccagctactagggaggctgagacgtgagaattgctcaaagctgggaggcagagggtggagtgagctgagagtgcaccactgcactccagcctgggtgacagagtgagactccatctcaaacaaacaaacaaacaaacaaacaaacaaaaagactgaagagacattactaaacatctctctaggaattgcctcctgaattccctttgtgtatgtgttcccagtctctggaaggtgtccctcaagagagtggttattctgggcctcttggtgtatctcatttgtctccgtacctgctgcaccaggcaatgtctgggtgttttggagtcgggacttaatagagtacatcagaagtttctcccagttacaggaccaggcactgccccttcctttccatactgctgtggtccatcggccacagaaccgtttctgtgctcagaggcctcacctccctctcctcaccatacttagacagatgcaccggcttggttgcagagcagtctgcctctgtgtggttctaataagtcctgaaagaatccagcaaggctctggaagcctcaggacagtggctttgctggaagtctcccttcttaggattgcttcttgtttagagcttttattttgttgcagtattgacgagaatttaattgaaatttaatttttaattttcctttaatgtttaggttgccaaactgttctacctttctggaatggtgcatggagaatatcaaaaccaagaaatccacaatctgggccattttattacagttatgaagtttaggcctctcatggcaaacttttcacccttatatcctggcagacaggtaaaaagtgattgtaaactttttcttcctgggccatgtatttcaaagctaaaaaggctagaaaaagaacagtgataggatttattttgtgcctatttgaatagtgggggtagaagtgcagttgatggaaaatgtctacttatatcattgctcaaagatgctgtgcctttgggagtaaattaattatgagatgtttaggaaaatgggaggacttggaagcatttaaggctacaggatgtggccccatcctacgttcagcctcggttttcagtgatgctgccttcgtgcccgggtgctggagtccttcgtgcgtgccttcagtttccttcctttgtgctcttctttgtgctgtgattttctcagcctggaataccccttttccacctgccagaatccaagccacagtacaaatcccagagcacaggctcaccctcttccagaaacggattttctgcatatgttcttcactcttccctgaccccaggtagacgtcgtctcccatctggtgtcttatggaatgaatgtcactttcagcctagagacacagttgtgtgcctgccccttttcctctgctggatggtgaacggtgcttccttatttctgcattttctagttcctaagtgatgtgcttagtggacaagagtgtgatgagtcattgacacatgaaaggaggtataggaactttggcattcgtttctgctgtatgattgagtttatttttctaggatggaagatttgacaaacccggaggatatccaaacaaacatcaaatgtgaccggcaggtgtcactttatggttatttaagaggagcacacttcaaagataaaagccaaattcacatgccaggtattctcttgttgtagaacatactagaattgcacataggattcttgggatggcttcatttctcaggaaaaatgaaaaatgaccaaacaagggaagatggccttgctggaggttttaaaagtaagccagctatgtgtaggcctgcaaaggtgttaccgaatccctcttctctgacctcttgtagctagagggccactgttccagtgtggcacaatgcccttctttagggtcatgggttaagcccttggactgtggatcgtttttaaccccccagtcaacagtagatacttactgacttcttgtcagttgaagctggctttttgggtcccgtcttccaggggtagaacattttgccatgagtgacatcggtttcctcccagacccttgtgttcttcctgaataacaaaagaagtgctgtttaaataagaaggagcagctggtttatgtgcctgtttctggagttgagggtgtgctgtatgacaaagacgctgtctgtgttgaccttggtggcagccacggttttcaggcatcagtgaggcaggagtctttgctctgaactctcattattctttcctaatctattttttaatcaaaaaaagtaatgtactcagcttttatttattgaagatttttctcttgtacttataataaaggcccaaatgcatattgtcaatatgtagaataaaaagaataccattttttcattgtaccaagcagaagagtcctgtcctccatgcctccttgatccatggccccagcgcgggcactgctgccagtgtggcacctgcacggcttatttctgtttctacaaaatcagtgtgctttccagctctcgtttgtctttttctttttctcaatcacagtggtctcctcattattttaaagtggatttccaatatttatttcttagttctgtagttgaattttattgggttaaaagcagggttatttaaaaatgttagaaaagctagcactgttgtagcactggaactgaggtttttctagctaggtgtttaggttatcaggttatatactcactgagctttggacaagtttaatggagatggggatccatttcaagctttgttataaggattttcttctctggtgtttgtggcattaagaaaagatctcaggaaatgtgtctaagataattttgagaaactgagtgaaaccagtgtctctccaggatctttgtgctttcctcacgtgccctttcttggtggccttgataggacaaggtggggctcacccatgagctggtccagagtctcatctccacctactccaccattgatgccaagatggcttcaagtcgagtgacgctgctttccaattccaaaccacttgggtcagaggctatagataatcaagggtaagtctgctttttttctatttttaataaaaagatatattacagaagattgtatcacccataattctgccatcataacacattttggtgggattcattctatgtcgttttgtttttctttgtgtgtgcatgtgtctctgagggctcttcacttacctgacattacaagggagtcttatcttgaaaaaaaatacaggatgcatttttcaacagacttcaaatattcctcaaataccacgccatcttccataggttgcttttttggtttttcagagacctgaggccacttggctttcttttgatggccgaaacactagagcagagtcagggagtttgtggctgtccagaagccacatgccttgtctctgaaagttttatttagattatgttgtattatctcccatgggtaggtttccactaatgtgtggcttatgtgaattatttttcagtctgggttgggaatttgtatacctttatgcttagtggatgtttgcaaaacattgattttgttgtattgatttatgactcccagtaaaatttatctgaaaatcttgagataatgtagtatataatttgttacaatgtgcataaactacctaccacagtgcctgacgtaatgagtgttattagctgttttcatttttgcatatccttctagtcatccttgtctacaagaatactctcttctaatatagctacaggtaaaatacataattttatttctatattctgaggattttttttctatacagtctttatgtaatcatgattttattgttaccagtgtttttttgttattgtggtttctttgtttttgtttttgtttttgtttttgttttgagataaggtctcactttgtctcccaggctggagtgcagtggtgtgatcttggctcactgcagccttgaactcccaggctcaagtgatcctcctgcttcagccccgcaagtagctaggactacaggagtgcaccaccactcccggctaattttttttgttctgttctagggacgagttctcactatgttgcctaggctggtctcgaactcctgggctcaagcaatcctcccgacttggcctcccaaaatcctgggattacatatgtgagccactatgcctggcctgttattcctgtattctaacttatccatcccttatggtatgatttttagttttttctaatttatgttttcatacttttatctattgtgctacgttaaaaagcttcatatagttttctttcatccagtgattttagccccctgataatcttctctatcagttatggcactggtgactcaaaatggatgttattcctctgtcattccttctaagtttgttacctggcatttttaacaaagagctttctcttctcccctttgtttcagcatcacggctgactaatgcacttgcgttttattccatgggttattttccatcactgtcattgtactttctgatgcctatgctgtcccagattcggctgcgggagccttcggcctgtctcctgtgtcccttcaactgtctctgttagtctttgagcatttcttactttctgacagaaccagaggatccaggctcattttgtcctcttcctgccttgggcctggactcagccatttctcttaaggatcatgcgtttttagcttagaaattaatcagctttccagaagatctataaaaccctaacttcccttttgagcaatttttttctaaaattagattttttttttaagggttattcctttattctctctataagttcttttgaagtgtggtgttagggaaccatgcctcagtttccttattaactcttccggtgtttatcagatcattttttccctacgctatgtcatcttaaacatcttaagcaattcattgacattttctgtttcttttgtattttcattgactatatttccagttctagattagctgattaatgtacaaattgaattattttgcatatccttggtgatataggctgttgatgccaaaggaggaaaaacaaatagacttgaaaactggtcgaatgcgtcagaaagccatttttggagatgattctgtgcgaacgtcttctctcctttcttgatctcttaatttttttttcttatccaaatatataccagctgattttgtctttctagaagatccaagatctttggtttagagatatattctcttaatgttaactggtattagaatactcttttctgtattttatttcgatgcattttaaaaatagaaatgattgtattttcttttaacttgtgaagtagagcatggcatacaaattttgtattctcattatttcaaaaaatttccttcttagtgtacaagttgtattcagcacataaagtccatccagctttgttgtagatgcagtgtgattattacatgttgataaggtgtgaattggagatgggatccaaaagtactgtacttattgtaatttttaagctaattgtagatttggtggtgaatattttactactgcaaaatgaaaacagcatttcatcagaagttgttttatggtctttcaggcattttattttatatctttgatgctttttgcccatgaagtatctcttttgtgtgtttgtgtgtatgtgtactgatttgctgtaaatttcacagtgctcattgtcagggatcatcagaatcaggcctaggcagagagctgagcagtactctcagtatgtctctgtgtcctggttgccgcatatctctgttgtttatttataaattggagagctctctgatgtgtaacaaaggttggatagatcagagacaattggaagacgaatcctctactctattgtcacctcttatttttctattcacacatgtcagatagagacatgcgtgttgtaaattattttgtcagaatgaaagcctggcagattaagtgatttcttctctttttgctgtacttgatatcgatctcttgttcatttcttgataatatgtttggttatttttgttttcattgcttttggtgtcagagatggctttggattccctgttctgtgtgctcctgtctggctcctgaacccagctggagaggtgtgtcaatcccaactggtgaagtactgagaggaagctacacaaaaggcagcaaggtgttaataagtgtacctctgacattttaaccacctctgacttttccatggaatggacaagtagtagtctctgtcagagcaatgttttaaaggaaaaaaagaaacttgaggtcgtaaactgtttattaatttatgctgttattttgtgtttactcaactcatttatattgacttgtaaattagtaatttatgaactactattcatcaattcattgcctacatgtcagcaaacaagttttcttcttaataaagaatccggtggctgggcacaatggttcacacctgtaatctcagcatgttgggagggcaaggcaggaggattccttgaggccaagagttcaagacccgcctgggcaacatagcaagatttcatctctacaaaaaaatgaaaatattggctgggcatggtggctcattcctatagttcaggctactcaggagcctgaggtaggaggatcacttgaacccaggagtttgaggctgcagtgagctatgatcctaacactgctctccagcctgggtgacacaccaagagaccacctcttcaaaaaaggaatctaggggcatcagtgtgtgcacacagcatggcttgtgaatgcggaagtgcctgtgtgcatagttgtgctcaagaatgtgttgatgattatatcttctcagcatgaaaaaaagttgttgttgtttttttttgagatggagtcttgctctgtcaccagactggagtgcagtagtgctatctcggctcactgcaacctctgcctcccgggttcaagtgattctcctgcctcagcctcctgagtagctgggactacaggcacacgtcaccactcctggctgattttttgtattttagtagatacggggtttcgccatgtgggccaggatggtcttgatcccctgacctcgtgattggcccacctaggcctcccaaaatgctgggattacaggtatgagccaccgtgcctggcctgaagttcacatttataaagatctctctacgtcttagatttgattcttcctttaaatatttttctcattgacatttgaaagcacctgaccttatataaaatgaagaattttcataactccataaaaggagaattatgacatcatctactatttctttctcttgtctcataaatctaaaccatcaacctgcttatttttgtatactgtcacactgtgtattccctgcattgaatgcctttctattgacattgtctgtaaaaattgtgggaagttttctgcaccctaaattttctgttatggggattagatatccagtatccatgtttttccaagtcttacatcagaaagggtaaatacagccctcacagcagcctgttgtttgtcctgcagttgtgtttccatcacattacacaaagcctctttgtcttcgtggttgtaccctgctaataagttttttttaaattatgtaatatgtgtatatacaaatacctatatgtatgtgtgtacacatacagctgatatctactgagattatgtatgcatgaactatagaattaacttgtaattttaagaaaataaattattttgtaaagataaatctcatgtttaagaaggggaattacaattgaatcatttagggatgcctcagcctaagcataatatggaaaaagccataaccaaaagtcattttagagtactgctaggttactcaacctatcatcacatttaattaaaatgtcagtttgaaccatggccagtcgattttcgttaatatgttatttaaatcaacttgtgaagtcttcattttagatatagaatttgtgttaatgaactggaaaataacattctattgcttggaagatgtgttaaagcctaaatatttatgactttgtaaaagaagaaaaccagctggtgatcagttggcattagtatataaggatgtactcatatttgataatagccatttttttctaacaagagtaagggagttgggaatgggaggcagagacagggacacagatatataaaaaattgtagacaaaactgtattgcgttctgagtatggttctgtgatccatggttcagtttgagaggttcctgtgtcccttatgagaagggacaggaaagccaggaggacaggagtatgtttgggcctgtgcctgtgcttccaccacagaagtcagcagctctacctttctcttttctcctctttatctaataattgtttcctcttcaaatttgggaaatgagcttaatcaaatatttgttgtgttttttgtttgtttttgaaatgtggcctcagtgtgtttgcccaggctgatcttaaactcctgggctcaagtgatcctccctctcagcgtcctgtgtagctgggactacaggcatgtgccaccacacccagctaagttaatgctaatgtgtagtttatctgattcagttttgaagggcggggtatatatagatagttatgttgtgtgtgtggtggtgggggtagtgtttatgtgtgtgtgtgtatatatatatttatatattactagtccattgctgctacaacaaactaccagtatgtcagggcataaaacaaatttattacactcccgtatgtcagagtgtgatgtggatctcactgggctaaaatctaggtggtggaaaggctaccttcatctctagaggctctaggggatcttttttctcgccttttccacattctggagtctgcctgcattttttggctttgggctcttctccactctcaccattagcaaccttgcatcccatgggcccttcttctatggccacatgtctctgtggctctttccttcccccttctcttccactgttaaggactcatgtgcttacttagtcctgaatggagacaccgtcatcatccacatgagcccactgtcctaatccatacaggctgctacaaggaaatgcattagaccaggtagcttataaataacagaactttgtttctcacagtcctggaggctgagaagtgcaagatcaaggtgccggcagtcttggtgtctggtgaaggcctgctttctcatagaggcttccttcttgctgtgtcttcgcatggtgagaggaacaaacaagctcccttgtgcctttaataaggtgctaatcccagtcatgagggcagagtctcccgtaaggcttaacctcctaatgccatcaccttgagggttaggattttaacacatgaacagtgacggaacacaacgttcattccatagcaccagggtagtctcctcatgtcaaggtctttacctgaatcacatgcatgatgtaccgttttcatgtaaggttctaggaatctgtggacatctttggggggccattattttgctgatcacatattacatattttttaatattctagactagtatgaaaacaatgccacttccattgctttatatacgtatctatatacacattgtctaatgctataattaaaaaaaagttgtagacacaaatatacccatttaaaaaaaaaattttttttgctattttacttcatactgccaactcctttttcctgaaactgcttcaactctggaattcttttttgctattagttttattttattgaaatattcatgaatgagcatacacttgtatatggatttaaaattcacagtaatgttctcatgagttcatctgtgaataacattttatagacaaaatgtctgcactaagacaagagaaagatctataattcctttgttctaaggtaccgccattcattgttattattttaaaataggagtgttgactgatgttaaaacacaaaatgggttcgggagtggtggctcccgcctgtaatcccaacactttgggagaccgaggtgggcggatcacctgaggtcaggagtttgagaacagcctggccaacatggtgaaaccctgtctctactaaaaatacaaaagttagctgggcatgtgttgcgcgcccatgatcttagctacccgggagactgagtccggagaatcgctggaacctgggaggcggaggctgcagtgagccgagatcataccagtgcactccagcctagatgacagagtgagactctgttcttcccccaaccccccaaaaaaacacaaaaagggataattggccgggcacagtggctcacgcctgtaatcccagcactttgggaggccgaggtggatggatcacctgagaccgggagtttgagaccagcctgaccaacatggaaaaaacccatctctactaaaaatacaaaaattagctgggcatggtggcacatgcctgtaatcccagctactcaggaggctgaggcaggagaattgcttgactctgggaggtggaggttgctgtgagccaagatcgcaccattgcactctagcctgggcaataacagcaaaactccgtctcaaaaaaaaaaaaaaaaaaattataactgggcagtggaattgaaaatgattttaaaaaatatccaaaatacctaaggaacttgtataaataaataggaaaaaaaaagagaaaaacatcaagaagcccacaaaaaagcagatttgtaaatgggcaatggattcgaatagacatttagccatagaaggcatccagttggtgaaaaggcatatggaaaggtgctcagcatcactgattatcaggaaaatgaaaatgaaaaccgccacgagtggtttagaccatagcggcatgcatgaaagttttcagacctccagttgttgggagtggctgaggagattggggagcttctgtctgagttggaagagtggagtctcaacaagaaccagcgtattctggacatgtgtgcgccctggagtgttcatggctggatgccttgtctacctgtgccttacagagtgacaccattgtggtgtggtcgatcagaggggcaggaggctttcagagggagtgggaagtggtggggcttggtttgtttgcccatggatgacagcaaaagtgagttggcttctcaagaacttttaccagtagcctgttttgctacaattctagacccagactggggtcccaaggcatcatagcccacagcttcttagcaagtgcatgttcagttggatcccccagctcagcctgggtcatccccacgttctgcctcttgggccatacatagctcagctctgtactgagccatcatcccatggtgagcaagaccccattcttggtcttcagtctctttccctgcagcatgcaatcaaggtggtggctggaaggggccaaggagccacatgtcacagtgccctgctgcctgaacaaggaccagaggcctgtggaacacatggctctcagatttctcccatttgatgactcatcagctgcccccacatggctttctagctcacagcagatctagccttctctgagcagtgaagatgggatgttttatggtcattttccctggtgtggagagcccaagtggagttcttcagcacaccctacaccatcccctcactaacacccccacctgtccagtcttacctgccttcatatcaaaagcactcagttaacccagagggcttcagccctgccctgcctgactttctaggaaacccctctctccacccaccctaatcagacactgtctgaaggttccccctcatcattttaaaaggaagagaaatttttctgacacagaggttctggtgaagtggccagctcccacatcacagggtgatggtggtttggactggaccaggatcagacagtgctgtcctggggctggccatctgataaggggctccagaaagggcagtgatggacccctgggaggctttctgctctcctgatcacaggtttttggtgagaggacctattggccactagggtgtctgcgggggtgtgtgtgtgtgtgtgtgtgtgtgtgtgtgtgtgtgtgatgtgtgtttacttggaatgacttctttcagcatgaagcccactgttttgctgaacgtatctcactgtttcctgaaactcagtacattcagctggcttaagggtcctggggcctcgctgtgtcatatttgcacaagcctagtgtctgtgcagactgtacactggagttcagttgtaagacccttttgatcccttattctgttcctgtaatagaaaagccatttcactcaatggaatagaaacccagatctaatggagagatgttctaatctgccatacactggggcagtggccagtgatttggactttgtggcacagatggaaatttccaggttctctaggtggtaggcagaggcctcactttttaagaaactcccccactccacccctgccaatgaggacattgcttagaggtatttctatcagtgttgagtagaagagatcatttcttggtgttgaatttcaggtaaggatgccagcttctgcatatcagggtggtgatgtttgggctgcgacaggtctagacagcagtctgaaagggggctcaaggaagtagctgtgaaaggcccctgggatgttttctgctcccctttctgcaaatcccctggagggagatcctgttagtcactacgggatgtgtgtgtgtgtgtgtgtgtgtgtgtgtgtgtgtgtgtgtgtgtgttcatcacttgttgcttggggtgggaagagacaacaacaacctacagaatccatagttctcagttcatctcccatcctagtccaatcatggcctaacatccttagctaccgatcgcagaggagactgcgcatttgtgttcatgtggccttggatgttggcagattcagattggtgccccaggcatctgtgctgtaactgcagtttcagcgggctcaggaccaggctaaagggcctccaagcttcctccagtttcctggtgcatgcatgtgcaatatgctcccctggcctgggtctttcctgccgcttcttgccagttgggtcagaactagcttattaaccagtttttcttctgagctttaatcgaactggctccaaccagttggaggcttgaaaagggctacgtgctagttatagatttttaaagatatattattattttagagtagttttgagtgtacagcaaaatggagtgcagagtccagagatctcatatgccctcaattcctgtatactctcgggtcactccaccaacaacctcctacaccagagccactttgaaacattagaaaatatatttgagcattcagaaatgtataaactaggcagccccagactgcaagcagctcagaggtcccacagagaggcttagggagggtgggggaagaattttatatggtgaatgtggaagaaaaagaaaatacttgattgggtgaagtggagcagtggcctcatttggaacattacagtggaaggtctctagttagatgttagttggtggtttctgattggttcttacatttccttttattatttacactgagtcaagttttggtttatttaaggaggaattgagtgcacggcagccacctcagcctcatggccacctgtttatttgattatttttaacagagaagatccttttaaaaatatctgttaccgtggctggagtgcagtgacgtgatcacggctcactgcagccacaaccttccagctcaggtgatcctcccacctcagtgctccccaccctgagtagctgggactacaggcatgtgccaccacaccaccatgctaggctaatggtttgtatttgtttgagagatgcagtttccctaagttgcttaggcttcttttgaactcttagactcaaataatctgcctgcattggtctccccaagtgctggaattacaggccatctaaatcttttatctcaggtttgccttgtgacaaaaggtggggtactttttctgacatgatgaggcagagaaaggtgaggtgggtgcatcctgtgcatatgattttctcaggtgatgggaatatggtgggctcttgcctaatgggatatattttctctttgaatgatttggcaagatatcagatgagagaagttgaataaatgttagaagaacatagaaaaaataggttatacacattgggtttctgaagaaatgatgtcattggagaaacaaaacttttattgatttctggaaacatttagggccaattttttgtgtaagtaatttgaatttatgatgatatctctgaccactttttgatattttttctggttcaggtgagtggtgtcattgagcaaacacaaagtcgggctcatccaaggatgagattttgccagagaaaggatgagcagcaagtcagggagcttaaggtaattatgagacagtgactatctaaaattgcttaggtagaaggagacagattggatttttgtgtgtttggtatttgggataagagggatgtgggtgtgtacttgagatgtgttgtttattttctctcttttttctttttttttttttgagagggagtctcactctgtcacccaggctggagtgctgtggcacagtcttggctcactgcaacctctgcctcccgggttcaagggattctcctgcctcagcctcccgagtagctgggattacaggcgcctgccaccacgcccggctaatttttgtgatttttttttagtggagacgagatttcactatgtaggcgaagctggtctcgaactcctgacctcagatgatccacccgcctcagcctcccaaagtgctgggattacaggcgtgagccaccgcgcctggcctgtttattctcttaagagagaaaatgaggggattaatggactgtagttctggacaaggtggaaaactcttaaagtggaagtactggggcaagtgctctgacagggtaggatggtgcagtcagtcccttcacccagaaatcagtagaatgttagcagttcagactcaaaccttgtgaaaaacaggtggtggaaaggaaatccctcacagcaactggcaccataatcaagacaatgtttacaggataaatggagttacctgctttcagccccaggtcgtagctattgtctgccctgctgatatgtgataataatttgtgatcctgttgtcttaaaatggggtcactcatctccagtagaattaagtccacagtgaagttgtccccccatccccaaagagataaacatatatgaatgaactcacgtgataacaactactgctgcctgggatcatgagagacctgaactgaactgataggaagtgaaaggtggctgagataatgagaatagacccatctgcagaggatcataaaaccagcaaagacaagatcttgtctaagatgccttcacaagctttgtccatgagaactcttaaggatttcaccagacctgttggctgctgctgtgatctctgcccaagaggagcctctgaccaacatccaaagggcttctggacccactggactcctctggaggtaccttggtctcccgatccatggctgtggttttttactccctttatcactgcctgtgtgtagaatgataattgcacaattgatagtgtgaagacctcttgataaatggtaaatctgagcatatgtatttggctgacatgtcattgtgaaacctcacagcttcagtcagtgtctctccaaggactaaacaatggaagactgtagaagatgctattcattaagatatcgcaagaatatggaagactattattcgcttctcatgggacaggacttttcagggcacctgaaaaaactcccatgaaaaatcacttttacaaaatgtcaagttatgatatccaagatgaaaccaatgagtcacaacattcacataatacactgtacaaccctgatctcttgactgtcatcaaatgtttcttacctctaaaccaaagtttcattttataatttaatttttctcattttttccattctcttagcttaagaaaagatcattacaaactttttgtaagtttttcatatatgcttgcaaagggtcgtaaaactttattgtgattattcttgctttaagctgaaacatccctaatctttctttagagattgtggcatagcatgttagtttcttttccatatccaattgttgtctgtaatgaatacagaaatacgggcactattttgtaactttaaatagacatcatctcaagtctacaagaattatccaaaatggtatttaatgacatttctaggtcttcagacactattaatgcagattgtagcctctaggtcctgaagattttactagatactggttactgaaactgagctttcttgaattctttttccttccactgtggtttcccgcatttcaacatatcacctatttttgtcctcaaaggttacttaaattttttccacagaattaaattaaatatgaatcatccctcctctgatttttgaaatgaccctttgcttcctatgataatgattcttctggtccgttttgtagttatatgttagagtttgtaaatagtcacacattttgcaactgcatgtaattttcttattattttttcctcttcctctaaaactgctgttatttcttttaactttttgtgggaaaaattaaacccatctttcactttgttgatatacttatttataattgaactccttgatttttgctcgaattgcttttcaagttacccacttttagggaagacattatttgggttttgtttagtgtatcaggctttttttagttagttgtatcaagaagtgtagacttttctatacataatatcctttttcccacagtatttttttttttttttttaagtctagccgggtgcagtggctcacgcctgtaatcccagactttgggaggccgagacaggcggatcacgaagtcaagagatggagaccatcctggctaacacgttgaaaccccatctttactaaaaatacaaaaaattagctggacatggtaacgggtgcctgtagtcccagctaatcaggaggctgaggcaggagaatggcatgaacccaggaggcagaggttgcagtgagccgagatcgtgccactgcactccagcctgggtgacagagcaagactccatctcaaaaaaaaaaaaaaacattctgttaaaataaaggtgatcaaaagatcttttcccaaacctttcctttaccagaaatagctctagtgtcacatggtcctttctcccttcttgcttttgtaggaatccaaagctaatctgtccctgatccggattgcacgcacctgtgccttttggggcccttctgcattagttcttccttctcttctaacctcaaaaatgtgttttttctattggctctttccctttaacatagaagtatactcacgcttttgttgaatcttgaaataaaagtcttcctttaccacatatctccctttaatactacatctctcttctcagccaaatacttgggaagagaagccctgagtttgtgtcattgttttctcacctccagttcactactttgcccactgcctgacatccagctcactcacacacacacacaagcccaatcactaagttgccatagctaatttgtagctttcctgccttcctggcaaaatttgactctgcattgggataatacatgtcgagtacctattgaacaggcactgtgctaggtgctactgttatagatatgaaaagaaggcatcatctcctttctaacaactcacaggagcagccattcctgattcatacatgtctcttgactcccagtgctcactttttcaagcttcacttaatgccgtgcaaatcaccctattctccaggtcttctttcttcccagttctccttactatacacaacttctcaaggcagtcacctccacacccatggcttcaattgctttctccattctctgagaacaatagaattttaaatggttttatttcatgtattagctttattttatacaaggtgcctcacctgctgtaaccatagattcaaagttgctccatgaaagtaataaatgaaaaatggtgattttttagcatgtaaattttaggaaatttccccagttacgcttaatggcttgatttagtgtgtatgttatttttgaaaacatatgttgggatgtcacaaatggacttagcctacagagatttatattcaacttttgaccagagagttccattttaatgtgacactgagagtaaaaaactatcttttcctccttacctatttctcttcctacattctcggccaggaggaaggcactgctacatacccagtcttccccagcagagcctgagcagctctgttttccttctacttcccctcttctttcacatctcatgaccaagcacttcctattctgtctcccaaatgatcacagactttttcctccacttttgtcactgccactgcccttagcattactctgcctttagagaaagtctcttaattggtttggttgcttccttcagtctttattatacagaccactacacgcacatctgacagagacttttcacctttttatggttgaatgactgaaattcccagaataaaattaaaaccaccccagcatcaaatttgaggtcaaatagaggtgggtttgtatcccaggttcatatactgtccagcagtatggtctcagaaaactgacctccttaagcctttgtttgtgtatctgcctaaactcattgagagttgggactatttcacacatacagtgcctggcatgtagaagggacttaatgttgaaagaaggggaggcattttaaaatccacatcaaaaaaatgttgttctgtttgggagtggtggctcacgcctgcaatcccagcactttgggaggccaaggcaggtggatcacctgaggtcaggagttcgagatcaacctgagcaacatggtgaaaccccatctctactaaaaatacaaacattagctgagcatgggggcgggatcctgtaatcccagctacttgggaggcttaggcacttgaatgagaatcacttggacccaggaggtggaggttgcagtgagcaatgattgtgccactacctgggcaacagagtgagactctgtctcaaaaaaaaaaaaaataaaaagtaaaaaaaattcttttaaaaatatacgaatctggctgggcacgatggctcattcctgtagtcctagcactttgggaggctgaggtgggcctgatcaacatggagaaaccccgtctctactaaaaatacaaaattagctgggcatggtgacgcatgcctgcaatcccagctactcgggaggctgaggcaggagaatcgcttgagcccgggaggcggaggttgcagtgagccaagatcacgccattgcagtccagcctgggcaacaagaacgaaactccgtctcaaaaaaaaaaaaaaaaaaatagtgttcagcaaggttgaagcataaaaggttaatagccagaatcatttatcaattgtatttctatacatctacaagacacaatctgaaaatgaaattagagaaacaatttcactgggcaacaagagcaaaacttcgtctcaaaataataataataataataatctacaatgtcatttcccatccaagcttgacttctacctttactttctgatatggttttgccatgtccccacccaaatatcatcatgaattataatccccataatcccgatgtgtcgagggaggggcctagggggaggtgattggatcacaggggcagttatcctcatgctgttcttgtgatattcagtaagtcctcatgagatcttatagggttttgttttgttttgtttcttgggatggagtcctgctctgttgtccaggcaggagtgccatggcacgatcttggctcactgcagtctctgcctcttgagttccagtgattctcctgcctcagcctcctgagtagctgggattacaggcatgcacaaccacacccagctaatttttgtatttttagtagagacaggatttcactacattagctaggctggtctcaaactcctgacctcagttgatccacctgccttggcctcccaaagtactagggttacaagtgtgagccaccgtgcccagctgagatctgatggttttatacatgtttgacagttgctccttcacatgttcccactctctgtgcggccaccatgtaagtcggacctgcccttctgccatgattgtaagtttcctgaaggacttccccctctgccatgattgtaagtttcctgaggcctccccagccatgtgaaactgagtcaattaagcctctttcctttaaaaattacccaacctcaggtgtttctttatatcagtgtgaaaacagactgctatactttctgataatcatgcttaagcaattggggaattcagactacctgggatcaaactatggccccacccttagcagtcatgtgaccttgggggggtttacttaccttctctgtcccaacaacttctgtaaaatctgtaacatgagattgtttctgagggttaaatgagcatagcacagtggggacactgtcaggcacacactacttgccagatgtcgagtattcatctttattgaaataggactgtggtaagccactttatggctctcgattttgtatgagaaaatcatgtttagtgccttgttagtaaaagaaagaaaatctgaaagtccctgccatggaaggaagaaatagcggggagaaaagggagttggtaagtttcagcatttcagagcttggagggacaagttaggtttctattttatggagaaggaggtggaggcaggatgggtcctaaggtgtcattcaaaacacacagccataactctttattgagagtagagctagggccccagggattgctgtgatcaagttgcggacaaaaatgaccactcgttggaagacaggagaggagtgtttagttacaaaagcagtcaacaattcaggtgtatctatattcagacagcaaataaaagttgttcaacttggttgctaatgggacccactctactgaggctttgtgtagaactcgtagaggaagctggcttcgaggaatgaactaccctgtgcttttcttaggactaaaatctcaggaagctggtgatgaatgaaaaccttagtcccattggcactgcacgaggggccaggagagcagcagcatcataagccacagggtggggcagccaaggcaggggcattctgagctgttggggaggggtggcaggcagggtggggcactgtgaggtgtcggggagggcattgtgaagtgtggggtggggcattgtgtgccacatgcctgggctcccacctggggccagtgggcttcagtctgtaggtgactacagaaggaggaggagctccgtctgttctctcttcaggcagttgttgtgtctctcagcgcttgttgggttcacaacctattaaataagccggctggtcttcaccctcccagacaagtcaactcaggggaggcagcagggtgcgggccttggcccgcagccctagccggggccggggccggggccggggccagggctggtgcccggggccgcactgtgaggtgggcaggcgaggagcgggaagaccatctctgcaagtgcagcatagcctcggcctaggacagcgggagtgcgtggccaaagctgtgagcagaggcacaggtggtggcagacagtagaggcgccccatggggaacatactgacctgtcgtgtgcaccctagcgtcagcctcgagtttgaccagcagcaggggtcggtgtgtccctctgaatctgagatctatgaggcaggagctgaggacaggatggcaggagcgcccatggctgctgctgtacagcctgctgaggtgactgttgaagttggtgaggacctccacatgcaccaggttcgtgaccgggagatgcctgaaggtaaggaggtgataggtgccatctaccctcggtttgcctctggctgctgctgtccccaaggttccctttgaggcatcccacacttcgagctcctttctgcttgtagccagctttcccgggggctggccaggaacaaaagctggctctgccttgaattcccaccccttagtctttccccaccgagtccagtcagtttcttttcacctcccctcccaatcgcccagttcttgctctctcatctcattctcccaggctggcatgggaccatttatttatggctcttgtcgaataagcagcagttgaataaatgagttgataaatttttataaatgattacgtcctttttcttttctccctctatacatatagctttggagtttaacctttctgccaatccagaggcaagcacaatattccagaggaactctcaaacagatggtgagacaacagtgtctgtagctctgtttattatcctgtgggactttgtttaggcttctttgagctattctcttccttttctcaataaaaactcaaatatcccaacttttcagtacccatcttaatttttctttgaacctatccagatggtacctaagtgaaggaaccaggtaagtgcctaattgtttcctttgttaaagtagccaaatctcaggacagttcctattcaaatatttggggatttcttatttaaaatcagaatggaggttgccacgggagaggctatatggtattcttaatgggctgctttaagtcaccttgatagaagctgcttagtttcttctaactgtaatttgaacacagaaggaaaaagaaaaaaggagagtgcttaaaataattgtgaaaggtataaaatgtcacagccggggctgcagaaaaatggttgtgtgtgtgtgtttggggtttctcaaaggagtttacctatgaggctctgattactttaaaattcttactttaacagaaaatgtgtctccagatttattctggtgacttaacagactttatttacctccttgttctaaaagagaggtggggattggttcacggtcaaaactttcaaaagacatgaaacgtcaacgtagacttttaatgtgtaatataaagattgcaggttaaaatgtcagacttccctgtaagagtgtttgttgccgtggctccccctttgtcccttcccctcctgacaatagcatcttgttcaaagataagaaagttacagttttggctgggcttggtggctcacgcctgtaatcccagcactttgggaggctgtggcaggcggatcacctgaggtcaggagttcgagaccagcctggccaacatggtgaaacgctgtctctactaaaaaagaaaatacaaaaattagctgggcgtagtggcgcatgactgtagttccagctactcacaaggctgaggcgggagaattgcttggacctgggaggtggaggttgcagtgagcagagatcacgccaatgcactccaggctgggtgacagagcgagactccgtctcacaaaaaaaaaaggaaagagttggagttttttagtctctacactgttggcagaggcaggggatgggagccggtagaaaacagaaaacaattagttggtttgcctctaaaattttgcaaagagatgaatctaagtaaaagtaattctgggtaataatatggttcttgaataaaaactgaaattttcaaaatagaaaacattgcatcataaacatattaaatccagttggcttattggtttcatttaaatgccagagatttcattactctagaggaaatgtcttatagctcttctatttaaactttggttgggctcttaatttttaaagaggtaggataattaagactcattatgagtgtgactttgtaacttggaagtactatcttcacatttcaagatatttaaggattgctttagaataaacaaatgcattgtgtgaattaattgattgtacctttatacacaaagcatgtaagtacttgtataaacttatactctgcttggtgatgtttggaaagcctgatggatgttacacaccagttagtagatgggtagtgttggatgagagcccaaaaatggctctttattgtcattctttaggattacaacacagtttatgtatgtctcacttggccctttccaatacaaataaggcctgtgtatgttctccctatgtattgctaatgaagaaatgaaaacttagagatatcacatgactatggaagacagctactcaagagaactaaggttctgtgtcctcagaatgaaatggaagtgacagatatgatgaatttactttttaaaaattttaaaaactctagaatacatcttatattttgcctataaaatagactgtcttttaaaacttactgccatcttgatttattttatgcaaagttgattttacacaactcaaagccaaaatttacctcttcttctttttttttttttttttttttttaaataaaggagggtgtcattgtgttactcatgctggcctcaacttcctgacctgggttcaagtgattttcccatctcagcctcctgagtagctgggactacaagcatgtgccatcttgcctggctctatcttatgtctatacattcatttcaatggataagaatcaaagtagagatagtgaaatagcctaaatgcagcagccgaataaacgagttgataaatttttatcaatgattgcatctctttttcttttcttcctctatgcatatagctttggagtttaactcttctgccaatccagaggcaagcacaatattccagaggaactctcaaacagatggtgagacaacattgttttttccgccaagagaaagaataaaagctcttgtttgatcaggttatagaaagtatttagaaaaactcatattggtttaaatttttcaccttttcacatgttcacttgtcttattttaatatgtgatatactttcctttagttgttatgatgttagtgaaaacgtgtaacctttttgtttatacattttgccatctttttatcaacacaattaatttgtcatgtgttggaggagtcatggatttctctttataattcttggatttatctttatttataattaatggatttatctttatttataatcccttttcccttgctccaaaaagtacactttaaagatgaatgatagaacttaggcttcagcttggttttcatttaaacaaattaaaaaacatagttgtttatcatcagggattgaatctgtgatttgggcctcctcttacacagtcctctgaccacattcatttaccacatccaagttcatgctactcaaaagttttaggttattaactttttcatttgatgtcatgtaaatttaaacatgccctactcctgcttatttccctaatgttatgttaaatcctcatttatttgccaacaagccatacacagccaagttttccagttgacttaaacagcaagaatacaagtgagggttctataatagtgtgcgaagtaatgcagcacagtaaaacacgggagtttgtaacctttgtttttatagtttgagtagactttgcccatcttgagtcagttatttctggttagaatttgtcttcattttttacattactataaagagatacctaaggctgggtaatttataacaaaaaagaggtttaattggctcaaagattttcaggctgtacaaacatggctttaacatctgcttctggtgagggcctcagcaaacttacaatcatgataaaaggcaaaggggaagcaggtggttccacacggtgaaagagagaggggaagggggaaggtaccacactcttttttttttttttttttgaaatggagtctcactctgttgcccagactggagtgcaatggcacaatcttggctcactacaacctccatctcccaggttcaagcaattctcctgcctcagcctcccgagtagttgggactataggtgggcaccataacacctggctaatttctgtatttttggtagagacagggtttcaccatgttagccaggctggtctgaaactcctgacctcaagtgatctacccgcttcagcctcccaaagtgctgggattacaggcttcagccaccgcacctggccagtaccacagccttttaaattaccataatgagaatttgcttattaccatggggatgggaccaagccattcataaggaatccactgccattacccaaatgcctcccactaggccctgtctccaacattaagggtcacatgttaacatgagacttggaggggcaacatatccaaaacatatcagaattgtatttcccagttccttccagagccatgggcttctcacacctagagagcatggaagcagtaaaagaaaagctattccatgtccctcactcttcggtggtaggaacttttgcctacaaggcccttccagcatcaaaggcagaggcagtgtaggaaacaaagcatggcccaagtccctcttggggcttttattattctggcctctttttagaggaaaaaaaatgattttttgagcttcagacaccatgtccaattaggtttgtatactcattttaacatcaaaatttaggccaggctctgtggcttacacctgtaatcccagctctttgggaggctgaggtgggtggatcacgaggttaggagatcaagaccatcctggctaacacagtgtaactctgtctctactaaaaatacaaaaaaaaattagctaggcatggtggcacgtgcctgtagtcccagctagtcaggaggctaaggctgaagaattggttgaacctgggaggtagaggttgcagtgagctgagatcccaccactgcactcgagcctaggtgacagagtgagactccatctcaaaaaaaaaaaaattaagatacgttactttccagttgtgtaaagaccgttttttaattttgatttgtttttagtgacatattagtagataaccactaagtgtggttcaagatgcttacagggattctgttgcatctagagataggtgtctggtcaggacgtagttcttagagctgttagctcttagagtctgataattaaagtaagctatgtgtaaatgcagaatgagagaatactaatggatcatggctcatatatgcaacagttaaactttttattagctaaatttttcatctggcctaatttttttacccttttcttttgtacatgaggattctttcatttgtatgtaatagaaacaaaaagtaaactaaatgaaaaactaagtttttagatttgacttatgaaattaatcatgccagataatttaaattataaattattgaaaattatttttttaaatggaattttgtctcattttacataggagtaatcagtaagatgttaacaactacttttattttatggtatttgtatcagaagtgaccagtttttttttttttttattcttagttgtagaaataagaagaagcaactgtacaaaccatgtaagtaaacactcaaatagttaagaaattgatagtttgacataaaaggatgtctctcttgatttctttaaattacaatgtggacctggtggtggtagcatggacctctttttgtggattttctaaatctcttctattttcctgagtattaaatttatccagaaaagtgtttagcttagcgtgtccaccttttaaagatttctgacatttaagttaaatttcaatagtctggttcaaaagatctgccttaaggctgggcatggtggctaacgtctgtaatcacagcactttaggaggccaaggcaggctgatcatctgaggtcaggagtttgagacaaccctgaccaacatggtgaaattctgtatctactaaaaatacaaaagtagccgggcgtgctggtgcatgcctgtaatctcagctagtcaggaggctgaggcagaagaatcacttgaacccaggaggcggaggttgcagtgagccaagatcgtgccattgcactccagcctgggcgacagagcgaaactctgtctcaaaaaaaaaaaaaaaaaaaaaagtgccttaaatatttaatcttatttttaatgaaagaacaaaaatagaatagttaagttaattgccagcactgtctattgactttctatcacagcgggtaaaagcgtatcttcctcgctacaccatgatcttatgtttctccctgtgtttcttccaattgtagcacactttttaattaaatcagtaatatttacatgattatgactctgcaaatattattcactgctaagtcatatggtgttttcactgtgcctctgcattccatgtccttcatcctgtctctgaaacagttctgaaatctgagcacttctgcaattctcctggatcttcttttttcctagcctatgttagtttatctatccaaatatcattaagtagcctctgggtgctctgtttgctttcacatccattattttttagcatgaagctaattttctgactatattcatttgcctattttctaatagctgtttttcccccaagtattgtagcatttatcacatgcctttcaaagatattttccatctgcaaaaacacatctgttcctttttatgtgtgtgtggggggcaactttctttggccttttgtcatcctagttcaatatagcgtgggtttccctagatatgctcaatgtctgcttttctgggctaactccttaaagtcttttgggatctcacgtaactgctgtcttgtgtgggatctcctgagtcctagattctgtgtttccttctgtcctgttatcgtctctagttgtacttgaacacattttcctgggtggagatgttaaaatccctcctctttgatagagagtacacctctaggttgaatctaaattgtatggttctgaagacattttgcagttgtgctcttattacagtgttgttcttgaatctattgccagtgtgtgatatgttatttacaaccaggttttagttatctgcggaagctttttagaatctctctctctaaggttctgaaattttataacagcttgttggggatcttttcattttattgaggctactaaacctgcagactatctcttcttgagaattttttttttattttctctgttacttttttactgatagtcttgttcttcagatgctaggctgcttagaccagtacacctgcattgatttttaatttttccccttctatttttttcagtttgtctttttattctagttctgggatattctgtgactttatcctctactatttctattgaattttatattttttgagagtgttttaagattttttttttaaagttttgctcctgattttgactggtcctatcaattccttttttctattgttttgatctcttttcttggaggcttccctccaatgtgtggtggtccctggcctgctttatttggaagcaggatttctgttaactgatagcactcagtgtgaggccttagaagcctgactagcttttcatttgggagacctcagtgtattatctggggatctttactgaagacatttcagtttcttctgagaaggatctcccaattttctgcctggaaagtaaaagcaggcctggaaaggaaaagcagagttagcaaagaaagttggagttccatttttggtgtacagttttctttatatctcaggtttaagccatagtatctctgagccagaaattctcaggtttgatatatccagagaacacacatctaagtttcttgtcagatggaaggacaggtagactttgggctctagttagagatttgcaactgaccttgctggctttttttttttacattttaccctactttccaaagtgccatttgcctgtaagttcacaacctgcctttagttctgcaagacaaactggctcgcttctgttccagtcactttctgtagtcagcaaagttgtgtttctgtgttatttaccactcctttgtctactttttatgtctcagcatttactaaaaattatctctgtcaaccttctgtgctggtcatgggtgtaacctttattttatgactaatgaggcttccagagggagacgaaataaatttgtggtcaatctattatatttaatccaaatttaggacctatgtttaaatcaaagtctaatttgagtataatgatattaagccagagaattttttaaattaatgtatctataataagcatattacacttttctcctaaggccttgtttaatattttcattcaaagtttatccactgccatatgcttcccattacttcacaacataaatggagctgttttcctgaatgcccaaggtgttagaaatatttaagttaattaagatttgttcatttttagcctggtcaacatagcaagacctcatgtctacaaaaaggttaaataacaaattagccaggcctcgtggcatgcgcctttcatattacctactcaggaggctgaggcagaggatcacctgagctcaggagtttgaggctgcagttaactataattgcaccactgcactccagcctgggcaacaaagggagaccctgtctcggaaaaaggaaaaaagttactaattctttaaaaacctatctaaaatttgtcctgcccaaaaggagagtgaaaaatatgaactttagtctttgttttattttatgtttgctgagaaaaatgctgtactttatttatttatttattatttccataggtttctgggggaacaggtggcatttggtgacatgactaagttctttagtgatgatttgtgagatttaggtgcacccatcacctgagcagtatccgctgaacccaatttgtagtcttttatccctcaccctcctcccagcctttcccccaagtccccaaagtccattgtatcattcttatggctttgcatcctcatagcttagctcccacgtaggaaagagaacatgatatttggttttccatgctgagttatttcacttagaataatagtcttacttccatccaggttgctgggaatgccatgaatttattccttattatggctgaggtggtattcctcatatatatatatataatatgtatgtatatcacagtttctttatccgctcattgactgatgggcatttgggctggttccatatttttgtaattgtaatttgtttgagttcctcatagattctggataatagccctttgtcagatgtatagactgcgaagatttcctcccactctgtggttgtctgtatactctgttgattgttccttttcctgtgcagaagctctttagttaagtctcacctatttgtttctgttgcatttgcttttgtgttcttggtcatgaagtctttgcccaagccagtgtctagacgggtttttccaatgttatcttctagaacttttatggtttcaggtcatagatttatgtccttgatccatcttgagttgatttttgtgtaaggtgagagttgaggatccagtttcattctcccgcatgtggcttgccaattatcccagcaccatttgttgaatagggtttactttcttcactttatgttttaggtggctttgttgaaaatcagttggctataggtatttgagtttatttctgggttctctattctattccattggtgtatgtgcctatttttatatcagtaccgtgctattttggcgactatggccttatagtatagtttgaaatcaggtaatgtcatgcctccagatttgttgtttttgcttagttttgttttggctgtgccggttcttgtttggtccatataaatttcaagactgttttttctagttctgtgaagaaggatggtggtattttgatgggagttgcattgaatttgtagattgcttttggcagtatggtcattttcacaatattcattctacccattcatgagcatgggtgtctttccatttgtctgtgtccatgacttcattcagcaatgttttgtagttcccaacggcatatcaaaaagataatcgggccaggcacggtggctcacacctgtaatcccagcactttgggaggctgaggcggacggatcatgaggtcaggagttcgagaccagcctggccaacatggtgaaaccccatctctactaaaaatacaaaagttagccgggcgtggtggcgctcacctgttatcccatctactcgggtggctgaggcaggagaatcgcttgaacctcggaggcagaggttgcagtgagccaagatcaccgcattgcatactccagcctgggcaacagagcaagactccatctcaaaaaataaaaaaaagataatccaccatgatcaaatgggtttcataccagggatgcggggatggattaacatacacaagtcaataaatgtgatacaccacataaacagaattaaaaacaaaaaatcacatgatcatcttaacagatgcagaaaaagcatttgacaaaatgcagcatccttttatgattaaaaccctcagcaaaatcagcatacaagggtcatagctcaatgtaataaaagccatctatgacaaacccacaaccaacataatactgaaagggggaaaagttgaaagcattccccccgagaactggaacaagacaaggatgcccactctcaccacttgtattcaacatactactggaaggcctagccagagcaatcacacaagagaaaacaataaaaggcatgcagatcagtaaagaggaagtcaaactgttgctgtttgatgatgatatgatcatatacctaggaaaccctaaagactcctccaaaaagctcctagaaccgataaatgaattcagcaaagtttcaggagacaaaattaatgtacacaaatcagtagctctgttataccccagaagcgaccaagcttagaatcaaaccaagaactcaaccccttttctgatagctgcaaaaataaactaaaataaaataaagtacttcggaatagacctaaccaaggaggtgaaagatgtctacaaggaaaacaactttagtatttttaatgggttaaaatgagaggcagcaggtacagcagaagtcagtgcgtgggcatccgcatccaatgggtactgcacctttgatggtaaggctttggttttgacttactaaattactaggtacgattattttctagtttttgtcattaaaccttaaaactactaagtaaccccttccatttcttgttaaatattgtaaaatttcatactctcatttatgctgactgacgttagattatttgtttctattttgtgactaccttaaataatacctataaagagtaaactgttagtagtgtttttgctgtaattaaatgtagtaagacttaccttccaaatgatgactgaattgtcaaacacttgtcgaagttttggatttactcaaaattctatgctcagcagctggaggtaggaagagtaagggccctcccttactcttatggagaggcatactttctcatgaggggaatactctgcaggaattagcatcttgtaagcagtggtgaattcaactaattagtgtataaaaatacattttttggtgtggctgccgacaaagagatccaagagggtagatggagtcgagcttgctgaagcaaggaaagagaaaagcagtattctaggcagagagcaggggtagagcaggaaaatggctaggtgcaggtcagatgatttatagaatgcaattgatcaagttttgaagtgaatgcaaagtattctccaagagtctcatttgagtcatgtcttggcagtcttatttaaacatgaagtgaaagttagattttttaagttgtcatttgtttttagggtgtgagagaatatttaagtgatactctttttatcctccacataagaaaataggactagagaaacctatggcttcctcacttgttggtggcctagcagccctggcacacagagcccctgaatctgaaacacttcttttgtaacaatatcacctgaaataatacgtttaggattagtaatttagtaaatgcattagtcttgtattcactgcaataaagtgctcttgtagcaggattatttaatacactacattttatcgtagtaaataaataatagaaggactgggcgccgtggctcacgcctgtaatcccagtactttgggaggctgaggcaggcagatcacgaggtgaggagatcgagaccatcctggctaacacggtgaaaccccgtctctactaaaaatacaaaaagttagccgggcatggtggtgggcgcctgtagtcccagctactcaggaggctgagtcaggagaatggcgtgaacccgggaggcggagcttgcagtgagccgagatcgcgccactgcactccagcctgggctacagagcgagactccgtctcaaaaataaataaataaataaataaattaattaattaattaattaatagaaattcttggctgctttttattgctgtagaaaaaaatatgaaatctcattttaaacttttctttctttttttttttttttttttgagacggagtctcactttgtctcccggcctggagtgcagtggcgcgaactcggctcactgcaagctctgcctcctgggttcgccccattctcctgtttcagcctctcgagtagctgggactacaggggcctgctaccacgcccggctaattttttgtatttttagtagagacggggtttcaccatgttagccaggatggtctcgatctcttgacctcgtgatctgcccgcctccacctcccaaagtgctaggattacaggtgtgagccaccgcgcccggcgaagccgacttttcccattatttttaacggtaattcataaaatccttgttaggtttgatgacaggtaccatattaagggcagcattttataacccatatcttaaacatcatctctggaagttgagagcctccaatgggttttctatagattgcacatgataccacactcaggcagttcatggagtgtaagacatatcttagtgctttgtcatttgacattttaactgagaaaaaaatacactttgataagtttgacttacacttcccttccccttcaggtatctactgagcgtttcagtcaacaatacagctcgtgttcgacaatattccttgatgacagcacagccatccagcattatcttacaatgacaataatatcgtgagtacaactatgctgccgagggacagattcctttattcggaaattatttcagccatttggttgtcctcttcagcaatcagcttaagaaattggagtcaaccatatattgatattcagattctgaatattaagtatcagtttctcttttaatcttagacgtcgtggtggaaggaaaaatcagttagcaaagaagcaaacccagaaacagtgtgtctttttgatgtctttatgcctttagacaatgttgaacacagtgagaaggataggttccctttattgaatgttttttgtggaaacttagtttttcaatgcatcataggcccaaatcagtgtgcactactttggacattatccttggaagaaggaacagcttttcttcttctggcaccacagtgtatctgcatttgaatttctcccattgtgcatgagcacctcgtgggccacaaagatgcgctttgagagcaccctgagatgaagtttattttaaaaggaacaacaaccaacaccaccaccagctccacaggggccgtccagtgtacattattctcatctccttgggttattagtcttgatttttagaacacagtttggaaagtgctaatttagaatattaatgtctttatctttaatttaacttttcattctgtaaacataactagcttataaacaattttgtttcaaatgcactagcctttttagctaattcaattgtcaataacttttacttcaattaaaagtggcaagtttacactcataataatgtcactttcctccctcccttttaacaatagttgagaggaaattgtgtttcaaacaaaaactgaactcaaactctgtctcaagtcctgagctttgggacctattgagtaatcactaaatgtctgtagtcagccaagtctcttaaatctttgagcacacatacacaaaaattactttgactagagtccctggcttcttctgagttccaaagattttgataagttagcatataattcaaaagcagctttgaagattaattttgctgaaactaattttgtgcttttttcctcattattctactttttagaagtctacttttgagagtatagtaagttttaatttgccaccagcaagtttgagaaataatcatttggtgtattcactattggtgaaataaagttattgaacaaattaatagggcaaattggcttcaagaagatatattgaaaaatgttttatcatgaatcagtagtgcactgttgtcagtgggataggtggaactcgctgagatcacttatgcaaggtttttttcaaaatgcaagtctgcaaatacatgtatcttcccatctccactttccctctatctctaggcactgagaagccttttaggaaaatcgggatggatgtgaggcatctttctgtgaagaaaagcatcccagaagattctgattttcaccccagctcaatcattccaaactttgctgctgattgaaatcacctgggaaacgtttaccaagaaccttgatgcccaaagccatacccaatactaattaaattaaaatgtctcatgtggaagatgaggcagatattaaagcttctcaggcgattttaatgtgcagcaaagtttgagagccactgcttaatttgagtttaggacgagaaactgctcctatttggtgggaccttgggcaagtcagttttaaggtttgtttccctgatctgtaaaacaagtgttgaattaaatgtcacataaggtcattggtcctttccagcatgtaactttaaattctgtgattttaaaattatttcagagatgaaaactacttgaagcactatagacatatccatctcacatgctaatgttacaggctttttaaaaagtgctaatattgtgtagacctattagtagaattgagatttaccttccctcagttgttttgagcctcactctacaaaattagctgggtgtggtggtacatgcctgtaatcccagccacttgggaggctgaggcaggagaatctcttgaacccgggaggcagaggttgtggtgagccgagatcacaccattgcactccagcctgggcaacaagagcgaaactccacccaccacccccccaaaaaaaaaattatctgggcatagtggcgcaaacttgtagtcccagcttcttgggaggctgaggcgtgagaatcgcttgaacctgggtggtggaggttgtgaggagtcaagatggcaccactgcagtccagtctgagcaagagagacagactctgggtcaaaaaataaataaatacataaaataaatcgcatgggacgaaaggtttcatcggtagaaaagcatataaaagggaaatctgttattatttatatattgtaatcaccaacagaaacgcgtcttctaacggcatatttccttgcattttggttctcatatttttgtaaaaaacaaagaaatgaaaacaaagtgcccttatggtactgttctgaactagaagatttgaatttcagggccgctaggagagtttcctctgccccccttttaaaaaatgtctgcaggcctaacaaatgataacatctattgttatgaatttgttttccttccacagtgtgaccttggagatacctcatcatatcacacaaaggtgagctttttagaaacctgtcttgttattctagctaattactttgcaagatatcaagctcagtgttaggtcacagctctagacatcataagctgtattgtgcctactaaaatatcgaagcaaattatttgtattttctttgttccttaagactctcataattcttaaatgattgagaatctcaaagagtatatgtttatattgattatattgatatttagtgtggtagaattatacaattgaaattttttcaaaatctatttttagtttagatttcacagccttaccactgttgatattatgggctagataatgctttgttgtgaggactgtcttgtgcattgcagagagtttagcagtattcatggcctctaccaactagatgtcagtagtaacccatgacccagtttataaaaacagaaaatattccttgagaacagtattgttaacagaagtttttcattgaaaaaaaacttttctacaacaaaaagttgagtaaaaagtgtgtcatttgtttatattatttaaagtctctcatgttgagcttaataggagacaaatggattctctagagctttctttgcaatttgcttcaaagaagcaatatgaggctgggcacagtggctcacgcctgtaatcccagcactttgggaggctgaggcgggcggatcacaaggtcaggagatcgagaccatcctggctaacacggcgaaaccccgtctctactaaaaatacaaaaacttagctgggcatggtggcacgcacctgtagtcccacgtattctggaggctgaggcaggagaaccgcttgaacttgggaggcggaggttgcagagagctgagatcgtgccattgcactgcagcctgggtgacagagcaagactctgtctaaacaaacaaacaaaaaaagcaataagctggtggggcgcagtggttcacacctgtaatcccagcattttgggaggccaaggtgggtggatcacttgaggtcaggagtttgagaccagcccgaccaacatggtaaaacccgcctctactgaaagtacaaaaaatggctgggcgtggtggtgcatgcctgtagtcccagttacttgggaggctgaggcaggagaatcacttgagcctgggaggtggaggttgcagtgagccgagatcttgccattgcaccccagcctgggtgacagagagagactctgtctcaaaaaaagagaaaaagaagcaataagatgacctaacctcatgcaaatatgtagttggtagaaggtgtatttttaaagttttcagacagttgtgggtatttgttaaaacactaaatcaaaacttcacaagtggtggtttcttaaattagttacggtggcattttacatattaataaatttattccatcagtactcattgatctttcttgcacagtaaatggatcttttgctccatacttgcatttataatatcatgcattagttacttggaatatattggtttatgttttattgtgtcaaaaatcacttttagtttaaccaccaatcttactttaacaggcctttaagtattgaaaagctgccaagcctacagtagaaggaacaagtttttcaaagtccacaggaaagcttaaattttatcattgggaacaaatacgtatttcccttgaagtgacaacctctcacttcatttatttttgagaatgatagttgaactggttttttagaccgagtttcactctgtcacttggctggagtgcattggcatgatctcagctcaagcaatcctctcacctcaggctcctgtgtagctgggaccacagatgtgtggcaccacgccaggctaattttcttatatgtttgatagagacacggtttcgttatgttgcctaggctggtcccgaactcctgaaggagctcaggccatctgcctgctttggcctctcaaagtgctgggattttacaggcgtgagccactgcgctggcccagttgtacttttaaataaaaatgatgttctgtgaaaaaagtgatttttcagttcacagttaaatcacggattctttaaaaacaaaaaaaaagcacttctcattaactttccacttattcagaatattagagacatgtcaagatttaacaacattaatttttattgcttcatcaaagacgttcttaagaaattcaggctatgttttttacctgtaggggacagtgaagaatagaatgactactaatgtaattggtaccactgccttgatttatgctgagaaaccagccattgtacctacttttgcttttatacaatcatggcaagtgtcaacgaaaaagcaggcaatgactttgtattactttcacaaatttttaaaatttttcatcagctttctcaggtttaattagtatgattcagaacagtgttggccaggcacagtggctcaggcctgtaatcccagcactttgggaggccgaggcaagtggatcgcctgaggttaggagttcaagaccagcctggccaacatggtgaaaccacatctctactaaaaatacaaaacttagccaggagtggtggcaggtgcctgtaatccctgctacttgggaggctggggtaggagaatcacttgaacctgggaggcgaaggttgccatgagccgagatcgcaccattgcactccagcctgggcaacaagagtaaaacttggtctcaaaaaaaaaaaaaaaaaaaaaaaaaaagaacagttatgacctcttaggccttctggaaggggtcttcgggatcccgagaggtccacagagcacatttggagaaccactggtttatacacaggcacaatgcattagttttacaaagtttaaagttcctcaaagactggcctcttaaaaaggtagatgagtttgtcattcagacaacagaaaatacataaaaacatcatgagagtatactacagagaactaaagagaaaggaagctaagaaatctgaatcacatttacatttattaaagtttactactactgctttgtagaacattcttgtgtttcaatgtgtggttagaagagtgaaaatatgtttggtttattgccatggcctgttagggagagtcaatactcatgggcatttctgactggttatcatataaaaggcttcacggtacagaccatgatgtgctgagaaagaagaagtcaggaaaccctctgcaagtcaggatccaggagaagaatttgtaaaaactgctttggtaaagtaaacaccaaagcacacaggaggaagtattttactcaacaaatattatactaagatattaacagtttttgaagtaatgcactttcttattttatagagatgcagatagatctttgagcatacctgatgaacagttacactcatttgcggtaagtggcacttttattgaggttgtattttcatcgtacacttgtatctgtttcatgctgaagtcaaagccatctttttttaaatcttccccatttcatgttgcatttagtcatcttaagtgttgtaaaaagaatgtgctggagtaagaactgatctgcagctctgtttagttagtgagctagtgtgagtaaatatactatccaaacaacagaaaatgtatctttttttttttttttttttttttttttttgatggactctctttctgtagcccaggctggagtgcaatcgcgcgatcttggctcactgcaggctctgcctcccaggtccctgttcaagcaattctcctgcctcagcctcccgagtaactggaattacaggcatgtgccaccatgcccagctaatttttttttcttttttttttttttgtaaagacagggtttcaccatgttggccaggatggtcttgaactcctgacctcgtgatccacccaccttggcctcccaaagtgctgtgattacaggtgtgagccaccatgcctggcccagaaaatgtatctttttaaaaggtaattgtgagctgtctataggatcctgcaagccactacccaatttttgaagccattcctcctcctgttccacacaggtttccaccgtgcacattatgaagaaaagaaatggaggtgggagtttaaataactattcctcctccattccaccgactcccagcaccagccaggaggaccctcagttcagtgttcctcccactgccaacacacccacccccgtttgcaagcggtccatgcgctggtccaacctgtttacatctgagaaagggagtgacccagacaaagagaggaaagccccggagaatcatgctgacaccatcgggagcggcagagccatccccattaaacagggcatgctcttaaagcgaagtggaaaatggctgaagacatggaaaaagaaatacgtcaccctgtgttccaatggcgtgctcacctattattcaagcttaggtgattatatgaagaatattcataaaaaagagattgaccttcggacatctaccatcaaagtcccaggaaagtggccatccctagccacatcagcctgtgcacccatctccagctctaaaagcaatggcctatccaaggacatggacaccgggctgggtgactccatatgcttcagccccggtatctccagcaccaccagccccaagctcaacccgcccccctctcctcatgccaataaaaagaaacacctaaagaagaaaagcaccaacaactttatgattgtgtctgccactggccaaacgtggcactttgaagccacgacgtatgaggagcgggatgcctgggtccaagccatccagagccagatcctggccagcctgcagtcatgcaagagcagtaaaagcaagtcccagctgaccagccagagtgaggccatggccctgcagtcgatccaaaacatgcgtgggaacgcccactgtgtggactgtgagacccagaatcctaagtgggccagtttgaacttgggagtcctcatgtgtattgaatgctcaggtatccaccgcagttttggcacccgcctttcccgtgtgcgatctctggagctggatgactggccagttgagctcaggaaggttatgtcatctattggcaatgagctagccaacagcatctgggaagggagcagccaggggcagacaaaaccctcaataaagtccacgagggaagagaaggaatggtggatccgttccaaatatgaggagaagctctttctggccccactaccctgcactgagctgtccctgggccagcagctgctgcgggccaccactgatgaggacctgcagacagccatcctgctgctggcacatggctcccgtgaggaggtgaacgagacctgtggggagggagacggctgcacggcactccatctggcctgccgcaaggggaatgtggtcctggagcagctcctgacggggtggacgtcatggcccgagatgcccacgggaacacagcgctgacctacgcccggcaggcctccagccaggagtgcatcaacgtgcttctgcagtacggctgccccgacgagtgcgtgtagtatctgttttatttgactgcagtctccttggtgcaaaaacaaaatgggaaaaataaggataactcagaatttcaaaaggaaatcacaaattcagctagtaatagcattttcagtacttttcgtaaactaagtaaatacacaaaatgttgatttttctgaccataagacatattttatgtccttttgccaaggtggatgtgttagtctcaggccctcctggccacattgcccaagtcacacaggcttctgtattatgtatttagataaaatgtgtgaaaatatatttgaaaaaaaatttcataaatgtgcattgatttttgtacacatggcacctctttttcatttttatttttatttttatttttttggacgatgttttgctctgttgccccagctggagtgcagtggcatgatatctgctcactgcaagctctgcctcctggattcacaccattctcctgcctcagcctctcaggtagctgggactacaggtgcctgccaccacacctggctaattttttgtatttttagtagagacgtggtttcaccatgttagccaggatggtctcgaactcctgacctcgtgatccacctgcctcggcctcccaaagtgttgggattatgggggtgagccaccgtaccaggcccatggcacctctcttaatttataaattgaactggatgtgaagtaataatgtcagctagttgagataagagggttacagttaggctgggcgcagtggctcacacctgtaatcctagcactttgggaggcctaggcggactgatcaccaggtcaggagattgagaccatcctggctaacatcatgaaaccccatctctactaaaaaatacaaaaaattagctgggaatggccaggcgtggtggctcacacctgtaatcccagcactttgggaggccgaggcaggcggatcatgaggtcaggagatcaagaccatcctggctaacatggtgaaaccccatctctgctaaaaatacaaaaaaaaaaaaaaattagccaggtgtggtggcgggcacctgtagtcccagctactcgggaggctgaggcaggagaatggcgtgaacccaggaggcggagcttgcaatgagctgagattgcaccactgcactccagcctgggcgaccaagcgagactccatctcaaaaaaaaaaattagctgggcgtggtggcgggcacctgtagtcccagctacttgggaggctgaggcaggataatggcatgaactcaggaggcaaagcttgcagtgagcagagattgtgccactgcactctggcctgggcaacagagcaagactcggtctcaaaaaaaagaaaaagagggttacagatcattgcacatggaaaatattcccagcagtaaccacttccattaatgtgatctacagcttttaaaaaggagcatctcagaataagatggtggtacaatttgcttattgagaaaggaaaaaaaaaaacacatgagtatattacaaagggaaaagaaggaatgtgatttctcatgattgaaagcttgatttagattgcatacagcttttgctacccaagaccaagaggctctggcaagacagggtggttttccgaatgccagactgaggtgccttatgaaggcagctgccgatggttccagatgtagagagataggtgatgcaggagggaaagctggattggaaaagggagagttttgtagacgggctacgctcattgtgcctttgaaagagcagagccggcagcctctagtcatcatttggatatacaggactagagcatgaatctgatgtagagctacagaatgaagagcaacagcagctgtttaaataccaagaaagtgtgtagaatgaaattggacaagccaagcatggtggtttcatgcctttagtcctagctacttcggaggctgaggtgggggaattacttgagctcagcagtttgagttcagcctgggccagatggtgagaccctgtatcttaagaaaagaaaaaataagaccaggtgcagtatctcatgcctgtaatcccagcactttgggaggccaagttgagaggactgctcgagtgtaggacttcaagaccagactgggcaataaagtgagacccatttctaccaaaaaaaaatcaagaaattagctggacatggtggcacatgcctgtggcctcagttacatggcatggcaggctgaggcaggaagatcacttgagcccaggaggtggaggctgcagtgacccatattcatgccactgcactccagcctgggcaacagagtgagaccctctctcaaaaacagataaagtggacagaaaataggtcagtaaggactaatcatttaagggacaagcccccagaagagtggctactagagtgggaggaggaaaagcagaaggagaaagagttgaagataggcgaggctgtggtcccagtgctgaattctgccaagcagtgacttgattcatgaacactcactggatgctgactctgtttctcttctgagtgctggggtagaggagaggagaggtggagcacagttcttgcttttatgagcttatgttctaggaagttcaagtatttttttcaggtagtatgaaatagcaggaagaggaagcaggctaaagggacacagagtgattgggggctattttaagtagaatgataaggaagagcctgtctagagagctatttgaacagtgacctgactgaagggacaacagaaagcagtgctgacattacaggtagcaggatgactgccaagacagaaacgcatttcatatgtgtttgaggaacaaacagcaaggtgaccagcatggggagagtgaagaatgagggaaaccttgaatgagaataaagcaattccatcttggatgctaatctgccatattctgattaatcccagttccaacaattcatctacgatttctattttatctttttaaaaaaattattttttattttttattttttgagaccgagtctcactctgtctcccaggttggacttcagtggcacaatctcagctcactgcaaacttcacctcctgggctcaagcgattctcctgcctcagcttcccgagtaactgggattacaggcgcctgccaccacgcctggctaatttttgtatttttagtagagacgaggtgttaccatgttggccaggctggtctggaactcctgacctcaggtgatccgcccaccttggcctcccaaagagctgggattgcaggcgtgagccaccgtgtctggccatacacatccctgctgaagcccgcattacccttcccctatgctatagaagccctgggtcgggggggtgggggtgatggcacagggatccaccatcttatcttggtgccatccctgacttgccttctgttcataaacgcctattaaatgtttctttctgagaaactggatttgtcagcctctttctttggtatctcaggttccttggcctttgcgggtaggtttatatagacctgctcagcacaggacaggcagtttctcaaaaaattaaaaatagaattaccaaatgatccggcaatatcacttctgggtatatagccaaaataattgaaagcaaggtctcatagaaatatgtgtacactgatatttatagcagtggtattcacactcgtcaaaagatggatgcagcctagttgtccataggcagatgaattgataaaatgtggtatatacatacaataaaatgttcttcagccttaaaaaggaaggaaattctaacacatgctacaacatggatgaacattgaggacattacgctaagtgaaataagccagttagaaaaagacaaatacggtgttccttcacttatgtgaagcgtccagactgagtaagcaaactaatagaaacagaaggtagaacgggggttgccagggacatggggaagggagaaaatgggaagttgcttagtggatatagagttttggttttgtcagatgaaaaagttccagagattggttgcatggcaatgtgaatatacattacccaacccaagggctctccttgacccctgttccaactgccacttagaagtggttaaggtagtaaattttatgtatattttaccacaattcaaaatagaattattattttttcattataattttttgagatccctcactctattgcccaggctggagtgcaatggcgccgtctcggctcactgcaacctctgccttctgggttcaagtgattctcctgcctcagcctcccaagtagctggaacttacaggcacatgccaccatgcccaactaatttttgtatgtttagtagagacggggtttcaccatgttcgccaggctggtcttgaactcctgacttcaggtgatccgcctgccttggcctcccaaagttctgggattacaggtgtgagccaccatgcccggctgtcaaaataggtgttttgttgttgttttttttttttgagatggaggtttgcttttgttggccaggctggagtgcaatggcaggatctcggctcacggcaacctccacctcccgtgttcaagcaattctactgcctcagcctcctgagtagctgggattacaggcatgcaccaccatgcccagttaattttgtattttattttagtagagatggggtttctccatgttggtcaggctggtctccaactcctgacctcaggtgatccacccaccttggcctcccaaagtgctgggattacaggtgtgagccattgcgcctggccttttttttttttttgtgatggacttttgctcttgttatccaggctggagtgcaatggcacgatctcagctcactgcagcctctcctcccgggttcaagcaattctctttcctcagcctcctgagtagctgggattacaggcatgcaccaccatgcctggctaattttgtatttttggtaggtatggggtttctccatgttgatcaagctggttttgaactcctgacctcaggtgatccacccacatcggcatcccaaagtgctaggattagaggcatgagccactgcgcctggcctgaaaaaaaattttaacgtttgagaaaatacaaaattttcatagtctccaagtatttctcctaagatctttccccctatgagggggaaagatagtatctttacaatggagaaacccagcagaaacctgaaccaaatgaacaagttcaacatcatcagtaagaagaactatcaatgccataactctgatggaatgcactgggaaggattccacatcatttttgtgctgtaattgccaaaagttcgtaacttcagtccaatcatggaaatacatcagacaatcccaaatcgaggaacatttcataaatactgatcagtactggttcaagatgtcacggttatgaaagataaggaaagattgaggaactgttattgcagtcctacaaaacggcgagagactaagaaataactaaatgcagcgtgatcctgggtggaatttgggaacagaaaaaggacattagtggaaaaagtggtgaaactccaataaggtcttttgtttagcgaatatgttcattttaaatcagttaaattatttaaatatatttaaacattagttaaatgtatttaattaaattaataaaattggttattttgtgaaataattttaatatagttaaatatgagaatgtggatttcctggttctgatcaccgtactgtggctatctaagaggtgcatgttcagggaggctgggggaggaataaatggacattatactattaagttggaagagagaaacctaccccatcagtcacaaaaccctcacattcatggcagtgtgtcggacgttccagtatgaatggcatttcccagatgtcagcgcgaggtccctgtggagggagtggggctccctgggaatctagtggagagcattcggggctcccttcctcaggagcctgcccttcctgcacagaagcgtcagcctcacctctgtaccactgcccctctgcctctcagaacctactcggcttcaggaagattctactgccagcctcctttcccagatacagcctccagggactcagccctgccttcccaagtgttcccgcctctcttgggaaggcgtgctctcagatcccacacccctggacttccccgggcaccacctgctccttcttcatttctccagctctgcgttctcactctgagggtcctctcctgctgggaatgtgtgttgctggcaacagtgaagattcccccctgggttgccccccatgccctgttcttctgcacttccctggcttcctgcgttggttctgctggtgtctcctgcttttgggtttacgtggcttcccagcttcctaatttctctgaagttgagtttgatgtgtgtattgatgatgggctttttcctcctcctcctcctcctcctcctcctcctcttcctcctcagtcttgttgttgccccatatagtttccagaaggagaaaagggacactgtaaaattaagctgctgcaggctgggcagtggctcatgcctgtaatcccagccctttgggaggccgaggcaggtggatcacctgaggtcaggagttcaagaccagcctgttcaacatggtgaaacctcatctgtaccaaaaatacaaaaattagcaaggcatggtggcatgtgccggtaatcccagctactcgggaggctgaggcaggaggatctcttgaacgcgggaggcagaagttgcagtgagccgagatcatgctactgcacttcagcctgggtaacaagagcaaaactccatctcaaaataataataataataataataataataataataataataataatgccatgtttctatcagacccagaaatcccgcagagtgagctggaattctctgtttctctgtttcccctccatacccactggctcctctctgcccactccctcttggactgcatcaccagggtgcctcactgtctggccctagtggaattcacacagtggaggacgtcataggaggtgggagagagagagagaggagaggtggttattcgctcagattcttccttgttggtttggcagtggccacatctttctactgatggctgcagctcctgatgatcctcctctacagccacagctctctttgggatctgtggacacctttcctgtccctctagacccagggagataacagctcccactcttgctggtccaggacattcctcatctcttattggttcccttaactcggtccacacttctgtgaacagcccctttcctcaagtacccattcgaatatgtcctctggcttccaccaggagcctgactgatacccacaggtgggtgaatgctggcgtgctgctgggcccctcttcctctggtgactggccagccaagtctccaggagtctcgttagggtgggcaggcggtgggcacagcacaaactgtgagctcaaatccacagaacaaaagtgggagaagacactggcaggatggaccgccacaaaactcttggcattcgtgacgtctgtcctttaaatcacgcaaggcatcatcatgcttcagacatgagacagcctaagtatttaagtgtttcaaataaacaaattgtttttcagaattggtaattgctaagttggcaaattgctattggaaacgttggctgtccttgactcagtgattcagccagctagtcccttgccaaactagtatgttgggcaaattccaccttgagaatttatctgctcctgtcaaagccagattctccctgcctgaggggaggctggacttgaccttctgactcaggatatgctgacttgggtccctaggtccaagggcggccctcttgggcccactgtgggctggacctcttccatgatggggtggtggagggcaggccccacctgattcacacttgacctcatccaggcaggtgaagttccctgcaggagtcacctgagcccagcccctcagaccaggatccatcatgtttaggaggatttggggctatctcatgttctttggctagaaaggggtcccactcttaggggtctgccctctgtggggcacagatggcttgctggggcccatggacggggctgggtgaatgggaatctggtcacagcagcagcagctggaaggccaagagggagggcaccagggcctgggacccatgtcttgtcctgggcctccccgggcctcttgccttctccccagcaggcatttgggatctgtgtctggacccagcctcgcccagaaggccatggtgtgttgtcattagaatcacagtgctcacaccaaggcagtgcattaaattagcagggcagggtctcatgggcaggggaccatgtggagggggtggggggaagggcagttgtccccagaggccatggtgggcctggctctgggctgggcagtgggccagggtcctgctgtgtggatgagctctgacaacaggctgtctgggtctggtgagctcctgaaagcggggactggtggagagtaccctagggtgggagctcatgaggagggggtctgtggggtctggaagccattctagagcaggcagatgacatttatcaggggagcaggcatagaaaggacccttgtgtgagtggggggacacacagcctcagaagaaacagggaaggggctttgacaggtccagggagaatccctgaggtttcctagaacaattcccaccagccatgtcccaggtgtcaccccatcccccaggcctctgcagtgccagcccaatgccctgggcaaagcatcctggactctggctgttacaaaaggaggacagggtcatctggacccgcctgagctccaggcccccgactttcacagccccttctgggtccagaagttcatacgtatataaatgaaaaatgtgcaagaatcatattattgtattctttttcataaagaggcccctctaaattgttgaagccccgattcacccctgcccaaaggagacagcaatggcatgtgtggggccacagtcttgagacccagaggtcctgctgcccacgatacccactgtccaccctagggggactggccgtagccctggagcccgcaaacaccatgcaggaatgcaagagggtctcagctcccgagtcccaggctgggagggcccacagtccagtaaactaatcaggccccgacacatccaggagagcagctccaggagcctgcattggggagagagcctcagacccctgccacaggcctgcaccccagaagtaggagcatgggaagacctctccttggctcctggccagcagaagtcacattccccagccctctggctccaaggcagcctcacgtcccagtcactccttggcacaccctaccagttggtcagagctcactgccaaagggcacctcaatgatgagtggagggaacaggtgtttaccaggagcttgcatgctttgcctcagggatgattagggacacagccaagaaggcacgctatgcccattttacagatgaggaaacggaggctcaggttgggctggtgactaagggaagcagcatgtggcaggtggcttgaggcatgtctgtccatcatgagtaactagggagcagccctgccactcctcatgcgatgcaccaggagccagggaagctgcttcctaggggattctagctaaggccagaagcatctccctgagtggtggtggaggcctctgtctactcctccaggactgccaggggataggagggcactgctgacctcacagagcctcttgggtgagtgagcatcagctgagcgacaccaggtgactacgcttctgcccagtgctgtgcccccctctgactcgggcaaggcaccaccctgaacgccccaccctgtcccatggaggccgcaaactgctctgcagagccagggtctccaggaatggggagggcagtcaccctcattccacttgtgttcatgactcaaaggactgcccaggtctccaggcccatagaacccccaaacctcttactaggccacactggggaccttgagcagcaggcttggaatcctaggccttgtctccaggtacatatcagtacccaggcttgggaagctttggtctcaggggggctggcactcaggccctctgcctcaaggaagaagcatgtccagatctctactgtccagccctgctccctgcccctatccttcacggggtccctaggacagggttacagaagcctcatgctgtcaggggatgctgccaccctagttccagggtggctccgcccagccccttcctgctgccgccctcactgactcacctgtccagcctcctactgggctggggtgagggcttattgccccagagcctagataggcaccagaggcagctataaaagcatgttgggccagtcctcagcatcctagttcgccactgtctgctgccacacgatgctgggaggcctggggaagctggctgccgagggcctggcccaccgcaccgagaaggccaccgagggagccagtgaggacccagggctcctttctacctgggctggggggatctggggcagactgggtctgtgggaggcggatctacgtaggcaggcgaggacctgcggggaggccttggcccctcaggaaccctggtctcctgctctaccaagtcagcacggagttgaggggtgcagacctggggaggtctcctgggggcagggcatgagtcctggtgctgggtgaacactggcagcttggacccttccctctggaaatctggggagcctttcttgtcaaaacagcctattctgaataacctatgcaggaaaaggaagatggatttttatttttaccataactttaaagcttcaaagatttcttaacaagtcaccaagtctgttcaaagtcaaaaagggcattttcaatttcatccaagtcccctaaagcatgtttatttttatttgtatttgtatttgaaatggagtcttgctctggcacccaggctggagtgtagtggtgcgatctcggctcactgtaacctttgcctcctgggttcaaagtgattctcatgcctcagcctcctgagtagctgggattacaggcacccaccaccacgcccgactaatttttgtatttttagcagagacggggtttcgccattttggccaggctggtctcaaactcctgacctcaagtgatccattcctcttggcctcccaaagtgctgggattacaggcgtgaaccactgcacctggtcccgaagtgtatgttgtattcagaggtcagcaggtatgtgtggggaggcccagccaggccccactcatgggtcatcgtgtgaaaaagtcttgcctgagtttgtgtcctctttctaaatggcagcagatgcgtattttgtttttgactctgcagctggtgtggaccacctgctttaacctttcactagcctctgagttttttatgattcctgttgggagaaaagctcagcgttgggagaaaagctgaggcagggcttgctagacttgctggctccttgcttctagcactgccattctctcaagtagccatatgtttctcattcacttgatacactgtttcctttcaacctccacatcctcaccacctgtttctttgttagatcaccaataaatagcgtgggctcccagaactcggggccttcgcagcctccacactcgcgatagcgccctgctcccattttctctctcgaactgtctctttgtcattcctttgactccgctggacttgccgcccccgtgacctggtgttgggtctcatcatcccaacagattcccattctaaagatgagggaaccaagaggtggaaggtagagttagaataagaaccatttcttctgactctgaaatccttcagttctagcacgctaccacccacactttaaaaaactctgaagtaggcagagaattccgttttgttggaggaattgctttgagagacctggtcttagtggatgaggctttggaaaccaacctgaggcaggcgctagcacatcctgagaggggtgtgacctggcacacaggcccagcctgggcttcatgtctcagctggcaagactgcctgctcattgccattccaggccgggcagggccaaggggcttcagggacccatgccctcatggggctcattgagctcgtctcccagcagccaaggccctggcgtctccaaatgaagccagctgtgggggaaggtccttctcatgagtcagtctgtcctggctgggggtggcaccccagagccccatctaggatgcccagggatgtataggtctgttgtgaggataagccagccctgagccctcaccctggactgggagggcagtgggcctgctctgagccctcaccctggactgggagggcagcggctctgctctgaaccctcaccctggactcgggggcagccggcctgctctgagccctcaccctggacttgtctcctctgttcagttcatgccgtggaggaagtggtgaaggaggtggtgggacatgccaaggagactggagagaaaggtacagccggctgaggtcgggcagggaaggagggagggaggaagggaagctaggtgctgggccaacctgttctttgactaaccaggtcaaactctgcccctaatgttgcagcctttcagagcctcttggctggggcagttatctatgctcatcagaggccacagactgtactgcgttaggacactgtctagatggttctctctgtggaataagaagacaaagtcacacaagactatgtgacagcacactgggacaaaacatttaacatggcagggtgcggtggctcatgcctgtaatcccagcactttgggaggctgaggagggcggatcatgaggtcaggagatcgagaccatcctggctaacacggtgaaaccccgtctctactaaaaatacataaaaattagccgggcatggtggtgggtgcctatagtcccagctacttgggaggctgaggcaggagaatggtgtgtacctgggaggcagagcttgcagtgagcctagatcatgccactgcactccagcctgggctacagagcaagactcggtctcaaaaaaaaagaaaaaaataattgctgggggcggtggctcacgcctgtaatcccagcactttgggaggctgaggtgggcggatcatgaggtcaggagatccagaccacggtgaaaccgcatctctactaaaaatacaaaaaattagctgggcacggtggcgggcacctgtagtcctagctactcgggaggctgaggcaggagaatggcgtgaacctggaaggtggagcttgcagtgagccgagatcgcgacactgcactccagcctgggcgacagtgtgatactctgtctcaaaaaaaaaaaaaaaaaaaaaaaaaaaaaaaatttaacatgtaaaattctatgttaaatgttaaattgatgtgtgtgagctatgagtagtactatgtacaaagcatgtgtatatctcattccttttcaacaaaatagattccaggtagatgaaggacttacatttacataaatgaatttattaacttactaggagataaacatcttagctcaggctgctcttataaaataccataggccaggtgcagtggctcacgcctgtaatcctagcccttcgggaagccaaggcgggtgggccacctgaggtcaggagttcgagaccagcctgaccaatatggtaaaaccccattgctactaaaaatacaaagaccagctgggcatggtggcacatgcctgtaatcccagctactcaggagtctgaggcaggagactcccttgaacctgggaggcggaggttgcagtgagctgagattgcaccactgcactccagcctgggtgacagagcaagactctgtctcaaaaacaaaaacaaaccataaactgggtgacttagaaacaacagaaatttatttctcacactcctggaggatgggaagtccaagatcaaggaaggcactggcacatttggcatctggtgagggagtctttctggttcatggatgggcccagctctgtcctcacatggtggaaggagctagctctccgtggtctcttttatgtgggtgctaatttcaacctcccaaaggccccaccccttaatatcattacattaagactgaggatttcagcatatgagttttgagggggaagacatcgtaaacatttagacatagtaataacatcagagactttggcctaatcttggagaggggagaatctttagaactatgacaaaaaaatcagcgccataaaggaaatattaagtaaatttgacaatccaaaactgaaattttctatagccaaaaaaaaaaacactataaaccaagccaaaagaaaaattatacactgatgaaaaatatttgtcataaaaatgataatccaatataacaacccaatataaaaatggtcaaaagacataagcaggcattttccagaaaaaaggataagcaggcaatgtacccatgagtagatgctcagtctcactcacagttgaagaaatgcaagttgttggggaaattaaaaccaaattcaaattcattctgcagtaatcctgctgcccttggtcccatcgggccactccagagactaatccattaagatggccacatcccacaggccactcaaggggacacaagttcagcaggtggatcactaggacattcttcctctttccaacagccattgctgaagccataaagaaagcccaggagtcaggggacaaaaagatgaaggaaatcaccgagacagtgaccaacacagtcacaaatgccatcacccatgcagcagaaagtctggacaaacttggacagtgagtgcacctgctaccacggcccttccccagtctcaataaaaagccatgacatgtgtacattgagcgctggatttattcccatttggatggaaacactaggcaaagtattttcttgttgacataacatattttacatatttatggtgtacacttaagtatttattacatgcacagaatagtgatcaatcagggtgtttggggtgtctatcaccttgaatatttggtattactatgtgttgggtacatttcaagtcccttcttctagctactttgtttttttgtttttgtttttgtttttgttttgagatagagtcttgctctgtcgcccaggctggagggcaatggtgtgatctcggctcactgcaacctctgcctcccaggttcaagcaattctcctgcctcagcctcccaagtagcttggactacaagcgcaggccaccatctctggctaatttttattattattattttttattgtttttatttttagtagagatggggtttcaccatgttagccaggctggtctcaaactcctgacctcaggtgatctgcctgcctgggcctcccaaaatgctgggattataggcatgggatactgtacctagccttctagctactttgaaatatacaatacattgctgctaactatagtcaccctaggtgaagtatttttcaacagaaacactttgcatgtcccccgtgtctcctctgctgaggtggacactggcactggggcccctgctgctggttggataggtcctcatgatgaaacagatgcttctctgtcatgctaagtaagatctttcatgtcaggaaggggctcttctggaagaatagttagtgtctgtgcttcatttcctaaaaaactgtttcaccagaaactatatacaactttcaggtgcctcagtgcttcaagacatgctaagggaggaccctcatttgtcttgcatgtttttgggatttttcttgagatgttcttgcaggactcagggcagataacagaccagcttgatgaagaatttagcaaggaaggcccccactgagctgcttcctgttctcgcagagatcagataagcatttctgctggacggttacagaatctggtcaaggagagactgagtcactgctcatcatcctagaagctgctgttgattttttttttttttaaagacggagtttcactctgttgcccaggcaggagtgcagtggcatgttcttggctcactgtaacctctgcctcctgggttcaaacaattctcctgcctcagcctccccagtagctgggactacaggtgcccgccaccactcctggctaattttttgtatttttagtagagacggggtttcaccatgttagccaggatggtctcgatctcctgacctcatgatccacctgtcttggcctcccaaagtgctgggattacaggcgtgagccaccgcacctggcccagaatatttatttagagactgatgtcaggcctaagtgttgatagtgggtagtagtgggcaagatgcctggccctctctccttctcatgagcaagtcagtatcatagaggttaaacatatctttaagtagcatttaacttaacattttttaattaaaaaaaagagaagtaatttgtaaaaatattgcatcccctatttctcttgctggaagctatttgttcttagcagaaatgagaaaaaaaggtgttttgcttaaaaaataagtgagttgctcaccatacttctggatctcatctagaattggactcacagtttgtgaacagcccaggtatagccaatgtcttagctttggaacgcttgccactttccagctacagctgaaccttatatcctggtttggttcctgatgactttcaaattctcctgacccaaacgcaagctcagaagcacaagcacattgttggtggcagtacagactgaaacaccctctttggatggcagttcctctcacaggactttattctccaggtatgcacaggcacacacaggtgcccaaaggataaacacacagatctattgtagcatatttgtattactgagagattagaaacatcctaaaatgttaaccaaatcgcttggatgaaaagttttgctctgcttattaggtttggcgtacaatatggaggtgacatctgttacttccagtgtattatagatactttagctccaaaaatgatacctgtacctagatgggcaccaaaagggaatggttaacaaatattgcatatacaggggtatggggcagctccggggctggggatggcggcggccaggtttgcagcggctccaggatgagcgggtggatcccgggaagcgtggtgaaatgggctggctcccgagccagccgggaggacgcttactacagctgctcagaagcaccactggaagctcagatgtaggtgccccagccagaagcagagaggggttcagagaagctacagagaagcccctcctgatgccccagggagcaagccaactccttccaggctccaggaacaccacaaagcaatatgaaacctgttcatgagaggaaccaggaatgccttccaccaaagaaacgagacctccccatgaccagctgctccactaaccacacatcctccagtgatgcctctgaatggtcccgaggggttgtggtggccgggcagagccaggcaggagccagagtcagcctggggggtgatggagctgaggccatcaccggtctgacagtggaccagtatggcatgctgtataaggtggctgtgccgcctgccaccttctcaccaactggcctcccatctgtggtgaatatgagccccttgcccccggaaaaaaaaaataatattgcatatgcagttgattaaatggcatactccatggctattaggagtgatgaaaatgggctgggtgcggtggctcatgcctgtaatcccagcactttggtaggccaaggtgggcagatcacctgaggtcgggagtttgagaccagcctaatcaacatggagctgtgtttactgagtggggctttcgcaggctggagctaagaatttccagtatgcgtaacagccacagcccaaatatctgccagtgagttgtgtaattccccagagcaggcctgggcagtgtctgggtggggcctgggagccacaggagatgcccaaagccaggcagagcccgggggcgaggggacggcaggcaggtgtggcgctgccctgggcgggcttgcacccccacacccaagtgagcggcctgctcactcctcagctgcaggagccagacgtgtggagtcccagcagaggccaacctgtgtctcttcatctccctgggaaaggtgcccccgaggtgaaagagatggcctggtggaaatcctgggtaagtgggagctggcaggagatttgggttcctgcatggtgttgggtgctggtcaccagggagtcctgagaaatgtaaagtcgcccttggctgggagtggctcagtctacatttggctgcctcctgggccaagcatggagggtgggaaggggccgagaagaaacagtcccaggcctagagtgcccacggcagggatgggacctgggccgggagacaggctgatgaagaaatctagaaatgcaagggggaagctgaggtttgagaagagtccaggggagggacccttgcaggggtggggccactcaaaggagggggtatcatggttgagccttgtgtgtaaatgtgtatggggtgcacacacgtgtgcatttggggagaatcaggcatactgctcctggcagagggaactgtgtgcagagggtcagagggcagggagcttggcttcgagggaagctgctcagcacagctcaagggtcctggtaccggaggagatggacctggggaagcaggcagggccaggtcctgaaaggccttgcctggcaggctgaggagttaggctttaccttaagagaagtgggaaggcactgaagggctttgagcatgagagtaacctgaacctgctgttggggacccatcaatgccttcacctcagggatcaatgatgttcatttgtcaagactggagagggaagaggggaagcaggaggacctggcctgctagagcctggaggaacccggggctcagggcagcccatccccagcagaactgatgggttctcgggagctttccatctatggttgagcctgaggccatcgctgtgctaaggagttgaatatccagaaggggacagaggtgacatctcccggctgccggctctgcacacccttttcctttcctcccaggcagcctcaggatgtcagggctgcactttctgttttgcagatgatgaaatgaaggctcagagacactgagtgacttgctagggtccaatggccagcaggctccagtcagagagcagttgggtctctctgcccagccccaggttctctgtgagcttttgtgggatacccaggcttgtccagcttcagggagtctctggatcatagatgtcgcaacccaagcaagtgtcctcagggtcagacatgctaggttctggacaggtgggacaaagaggaagccaggctgaggtggggcagctgtcctggcccccagggaagcagccttcttccaggacaaggggccatggaggcctgcagcttcaaccagactgctgggaacctgcctttgaggaggtggacatggcagggagagcccagtgctgggtggtttccaaagtcagttgctggccaaggcagtctggcactgggccttgcacccagtgcagcaggacaaagggctgtccatgtagggacctgccaaattgacaggatcactgtgacactcactgagtccctactctgtggccggacccttctctaagcacctcacattcaatatctcccttgaacctcacaaggagtctatgaagtagacaccagtatccttatccacagatgaggaaactgaggcacaagtaggctaggcaggtgcccgaactcactagtaagtgtgagagtctaggtgagaatctgaacagcctgactccagggccaaaaccataccctggtcgtccataccccatgtgagagctggctaggggtagcaagttcacaggtagaccccacctgcaacagctgagctgctagcgaagacccagtgtcctctaggcacaaagctgggccaggaacgcgatgggaggagatgagggagccactggagagagatctgtctgcaggcagggtccatctgcacctctctttttggtgttgccttttcctctgtgtctctcatagagacaaacccatctcccaggcctctgggcagccacgtagcaggggaaggccaaggcgtggcagctcccctgtgcctgtcacagaacaagttatattaatagatgtagtcacaggctggtctgagtcaccttttcagtgaaaatgtgcctgtctggactagcacggccctgggcaagaccctgcaggagcctgaggctgacccttccttctcagcaggaggtctggagctccaggactccacactgatagccagggctccgattcccagaacacttattttctaaaaccttagagtgggaagtgagacagaggcttctcaatgcagcaaaatcagaaccagccagggagctgcttacaaatgctgcacctgagacctaccgcacccctgcgggactgcatgctcctcagggatgcggttacacagcctggccactcgctggtgcaccacagcccccgagtgctggggcagagggaagccggcaggcactgagagctgagatgcctcccacattcccagatgacctgcgttcctgtgggtgaagcttccttcagtggaacgttccaggaacactcattgtctgggaaaggtggagtcatcagtagggcaggggaggtagatagagctcagcttctgagtcaggctggggagtcccaacagcatcacttactagctgtgtaagggagtccagctccctttctgtaaagtgaggcatcagtacttacctagcacaactgttgaggaagccatgacataagcattgcttctaaagcacctggcccaggtctggcacacacaaggggcttgaagtgctaacaggagtaatagcagagcgtgactccacaagcaagggatatcgtgtgtgtggacaccgatgagcaatatctgggaccacactggctctctctggatggaatttccataggaattatttctaacaatttctgctgtgaaacatggtgctaagaaatgactcaggaagatctgtcaccagacatttgaaattaaagcaaagagttcagaaagatgccttacctcttactcaaaggaaagatacttacagatataccatccattggaatctctgtattttcacaatctaacccagggcttcgatggatggatggatggatggatggatggatggatggatggatggatgggcgggtgcatagatggatgggtgggtggatggatggatggatgtggtagtcaaatgggtaagtgcgtaggtgggaaagtagatgggcagatgatggaggtgatggaaggaataagtgaacaggtaaatggaagacaagactggatgggactaaactctttttcatcctggaggatctctgagtctccctctaattcaatacctatctccaatatccctccattctctaccattcctccacccaaaacacacttatgtccatgttaatcatctgagaaattctgcagggcacaagtttaaagagccttcaggcaagccctgaactggaggcttggaaatcaagggctcaggcacttggttatctggtttatttcacaatctgcagagcatcgtgcgggtttttctaaacctgacgctctgagccccatgggcctgtggacttgcaaacaccctgaactatcaatatgctcagctgggcccctgccctctaagttgctgtaagtcccaactccccaggaagagggcagactgagctcaaaccattcctcagaaaggcagaaccatgctcagccttccaacctcatctgcacactctgaaggtggtgcatgcagctccaggaagcctttgcttcagtgttctttcccctcctaactttgggtgagtttgtcccttcctgctgctggtgggtgatgctggaaggagctgggtgtggctggggctgctgtctgcagtcagatggcacagacagggacaggaaaggttttgtggcttctccccacaagctctggctctggctactccaccctgttggccaaggggctgaagggcagagcactggcctgcaagggctgagcagatctccgtgcccagggaaggggctcaccctgtcagggcgggctaccagatgggctgggagcctgctctgccctccctgtccctgcctgctttgagcaggcctggttctcttgcagattgaacaggagggtgtcacagtgaagagcagctcccacttcaacccagaccctgatgcagagaccctctacaaagccatgaaggggatcggtgagtgggtgttggcagccttgccacctctgctcaagacccctccgctcacagccctggaaagcgggtgccaggggacatctggggagctggggtgtcccatgatactctgaaactgattccactacccagagaatcacacagccctctgtttctgcagtgaggtcagcacccaccctgcaagactggacaggagggtgctgctcttccctgggtaatgggggtggggaggtgagctgtgtgtctctgtgagtgacttcccatcagtctcagctttctcacttgtaaagtggccccaagaattcttggccttgtgtgtcacatgaagtgtgaagggggtggtgctttatgatgccaggcacagagctgccaggggtgtgaggtgttgggagtttgtggggctgattcaaggcccccttgccccatgtcgatggccatggagccggctcccttcccatctcctgcacttgcccagtgctgccctcagcactaccgtgagtgggcgagggctggcctgaggccagatttaaacagcttgcccagaaagccctcctgacctgagagcagagcatgtaccctgacctcaccccaggtgggactgaccccttagccggctctgcctgaggatcaggggccttaatgagaactgccgctcctgacaagcccagaaaacgttctcatgccctctgctttctgtgaagcagaaagttatctccacttcccaaatgagaaaacggaggcccagggaaatgaggctggctgcccaatgccacgcagttgctgggccaggcctcggattcaggggttggactcttagtcttgaccttcccctactgcgaccaacacaaaggagggcagggccagagatctcactcggccaagctccaaaggcccgggctgatgtccagagccacccagacctcagattccatcttgtgaggctggccttgggcacgccccaacattgtgggggtgtggggtgggaaatggggaggcagatttcctaagggtcttgtttacaccacgaaaatggtctgggggtttggaactatccaggtgtcgggtcccaactgctcagccaccaagcagctgccttcgccttcccctcctccgccctcaccagtgtgtcaccctgggggcagcagggtcacttgtgctgtaaccctgcagggaccaacgagcaggctatcatcgatgtgctcaccaagagaagcaacacgcagcggcagcagatcgccaagtccttcaaggctcagttcggcaaggcaaggggaaggctggtgggggtggggataggtgagccttggggttgggggtacagcctgggaggcagctccattctggacgactttcccctagagccagcccactggcagcatgggcacatggaacatgtttgcatgaaaacaattgttctttattgaaattcaaatgtaactggctgccctgtgttttatctggcagatctacttttaggtgtcagagcccgggccgggggctggccttccttgcttcctttcctgcctcctctctcacagcattccttctcatgcacccaacaggccccactggaggtctgtctccctgcccccaggctatctcgccctgccctctgagcccagaccaccttctcttttccatgccccaggcatgcaggcctggctttgctctgttctggggcgtgggcatgctttcctcagtcgagctgcttgcacccacacctcgtcccttctgccacctgggaattctaagagcctggagtaagcatgccaggccctttgtttctcctcccacctgcactccacccctaggacaaagcctgacatttgggggtacacagtaaacacaggattaaatatgtgcacagccatggttgcctcaagcctctagtgactcatatcattagtttggagatgtaacgaaggaagatcagctcaaatattctcttggagaacccagtatgcatttttacagtttccctctcttagtcctcacagtgatacattctttgtattcaaacatttggggaaactggcactcagagaggttttaagttgcccaaggtcccagagcctgtaatcaacaaggtggggattaaaatccaggtctgacaaagcccttgatctctctgctgctctgtagatcagctgatgtagcctggtggctcctcgtagcaacatgtgaccttagaaggaggcacatgtgagacgaagtctttaattcaggcatgcattcattcattgagtgccaagtgacaggtattttatggtgatgccatactcagagcttgcagtctagctagcaataccaatttcattttactgagagcttatgatgtgcccagcactgcactgaatgctgaattgagtcacacacaaccccctaagcaacgggatgaagcaggagcacgtttctctccgtgtaaccggtaaagatactgatgctaagagaagctaaggagctggcccaagaaacccagccagcacgtggcaaggcccacgcagaatccagcccaagcccctggacccagccaccactccgctgcctgcactcaggtgggcctggcttatgacaaatatcacctttccctgttcccgcattaggacctcactgagaccttgaagtctgagctcagtggcaagtttgagaggctcattgtggcccttatgtacccgccatacagatacgaagccaaggagctgcatgacgccatgaaggtaaccaggcagacagggcaggggagtggcaggggtgctcacatgactgggtaggggcaatgcggggaccgggaacctacagcccagagctccccttgagccactgtttggaatggccatatgggccataactgggcccagtgagcaggcagcctgctgctcagactgcacccaacacctggagtcactggtgcctgattgacacgttgagtggccgtgatgaagccaaaatcagtacttctcagaacctcacgagctcaggtgtacagtggtattggaaacccacctctacagtcccaggcacagccccttgggtttccctttacctctcactactctttgcttttgcagattaataaggatggggacccagtaactatagtcattttgtttggaaagacacttgctgcatgggcactgccaggcattttacacccacgctccctaatctatctttggcgcaggggaggcttcttattcctgtttatggatcgggatgcttaggctccaggacatggagcagcctgtctgagaccacccagctaaggagggagagctgagacagggcttccccgtcacagcacttgccctcaatgttcatcactgaagcatgtgattttctcatcacatcctcccacttcaagtggggcagggcagtgaggtccttcctgaggctcaggcatcttgagaaaagaaggtgtggacagagcagaaggtcatggcagagcactccagcaggcagaggtttctgtccacagggcttaggaaccaaggagggtgtcatcattgagatcctggcctctcggaccaagaaccagctgcgggagataatgaaggcgtatgaggaaggtaaggggtggcacagatggaggggctcaggagtggccacaagctttggcagcctggcagggaacaaggatcaagaattaacctgggccacactagaaaggaccctttggggacttttttacccacaggtgctgagcacctaccgtatgccaagatctgtgcctgatggtgacactgaacatgattcagacttgatctgtaagctcaccagctcctcttacaggggagagaggcctgtgaccaactaaaatctctgcccttgaggactgtggtagtagggggtgtggaccccaggctagcagaggccagtcagtcctccacatcatgtacctagtggggagttttcctggaggctttggctttgccaagccttgagatgaaatggagcttggttggcagcccctagcctggctctctgacctggtccatcttgtgctttgagcttggttgggtacgcatgtcgcttctagttgtgaagcaccacccaggcgacagccacttggacacccgggcattgcatccatgccctgtgccaaggactttctttcctagaaggctttaataaggagaagtatggggaacagggctggaaggaggaaagcaggccccgggtaggctgtgggcctctgcttgtgcctcatggtcctgtttccctgcagactatgggtccagcctggaggaggacatccaagcagacacaagtggctacctggagaggatcctggtgtgcctcctgcaggtgtcacagcctaggctcttgggagtgccttggtttgggagtcccaacagctccaccccagggagcagcccttgaatagcgccacaagagtcagggtaggggcatgggatagcccagcagccagggctcattgggtgtgtctcagcatggttagagggtcccaactgcagagcccccacacctgtccttactcagccatgtgagagcatcctggaagcgggaggagagcaggtccttcgtgcaggcctcatgccaggcactttgcttaccttagctcactgaatccgccaagccttatgaggcagtccttaccacccccattgtacaaatgaggaaaccaagggctgaagagaataactggcttgtcgaagtttccacagccaaagagcagcagagccatgcctgccctccaagcccaggatcccccctgtgcccttaatgctctggtcagctggcctgccttacagagccacctcctctgttcctagggcagcagggatgatgtgagcagctttgtggacccaggactggccctccaagacgcacaggtgaggctgcgcccagccggccatgtggccccaccccctgccatctggactccggctcctctgcccacgggggctttctctgacactgggctgggacccacccagctcagctccctataggcctttgtcctgtggtgtctggggaggagagtgagggtgttgggagactcgggaggaaggagtgtgacttgggggtgggggagcactaaagctctgtcctggcaggaacagcccatgaacccgggggcgctaggccccagtgctggacacaggtgtccgggtctctgtaggtctgcctgctggcagagggaagtctggggaccaggcagttcctagagcagcttgtggcccaggatagagaaaatattctaagccagagctgctagagaaaggggagctccctgtcagagacgaccaagcaggggagcatgctggcctggcagagtggacagggccaggccatggccacagctctgggactctggggctcagtccctcacctccctggtctccctcactggcttattgtgggtgtcccaatgctaggatctgtatgcggcaggcgagaagattcgtgggactgatgagatgaaattcatcaccatcctgtgcacgcgcagtgccactcacctgctgagaggtaccagggagggaggggctggggccggggccacagggggtgtcctggccatgagcctctccctcgtgcttctgccttgtcaagtctagagttagggagagagccagggagcccaggactgtttccccagccaccagtgggaggtcagggcggcaaattgatgtgcgatctctgatccgagacactgaggggcatcacgaggaggtctgaccatcccctgagcagagccctctccacagtgtttgaagagtatgagaaaattgccaacaagagcattgaggacagcatcaagagtgagacccatggctcactggaggaggccatgctcactgtgggtaagagctcagacttgcacgtttttcaggccacagggctcaccgtggggcagcaccaaagaacaaagggcctagggatgcgaccacaagagaaagaatccctgtgtcaccttcacgggatgtccccccgactcacactctgcctgtctccctcacccagggactgctccacctctagagtcccagtgtgtgctgccaaagattgttctctgtgctgcccacgtggtgcccagtgctgtgtgggtgtgtctgcatgagtgtgtgtgtgcgtgagagtgtgtgtgcctgagggtgtgtgtgcatgactgtgggtggaatgtgagtgtgtgtgtgtgagacagacagtgtgtgtgtgtgcgcacacaaatgcatacgccagtgattatgccagccccaaccctgtgtgtactcatggcagccatgcagggagcactctggctgtggttgtgaagccctggccagcacaaagtcatctttctggacatgaaccaggggcctggcccctgccttcattgccagttgaagaaacagtgatgtgtggcttgagtccaaactgagtgacggatggtctgatgctgagaaacactggggatcttccccacagcaggaagtcagggccactcaggaggacccactccagagctctcatgggttccagggctgagatcacaatgggaagagtcactgcagagtaaagagctgaggcccagggcagagggacgtctcttctcccacttacacacagagcccaggtccggactcctggcctgcagctctcacctccacaccaggctgcctccgtgcaaagccagcagccagcaggctccctgctgtttcctagcctctctgggtggacagggccatctgagacaccccagctggccttggatgctgtgatacaatccggtctatgtcaggacatctaatcacacccctgctccaatctcagcttccacccctggatctggcctgaacccaccaagaatgaagtctgccagcagggaatagtgaagccatgcagtgctccgtcatgctgggccttcctattcacttcaccttgaagcctcgcatcagtctcacttcccagatgagtcagggaggttgagtaatgaagccatactgcaccatcaaggcaggaagtgaacacatgcctacctcactcaaagcccatgctccttctgcagccctaagtgaaaatgccaaccttccccacccagatgccaagtctctgagcagtacccatgggagcaagcatgggcccagtctctggaccagacgcccccaggtgccttagtcctgtggggccaaactccacttgtcacatgggaattcaaaatgcagggttcctgctgataagtgtgagagagagggcactctgaggccagcagccaccatcccatggtgcttctgtggagctgagaggctggatttttggtggaggtgtctctgggttgagagcccagggcctgtcctgagtctgagctgcccttggatgggcttgagctggtgtcttcagacgagccccacagtctggtgcatttcacatcttacccttttgcctgcctgcttgggcctttggagctgtgcccagtgccccgggctaccttccctgtcccacgccacctgacacaaagcctctcacattgggaaaggcacggaacaaagaaatatgccaagccttgcacaacactgactcttaagacctaaggcaagacataaagttgtaggcagtgccacctaccagctccagacattaacacagctttcttgtttgccagtgaaatgcacccaaaacctccacagctactttgcagagagactctactatgccatgaaggtaactgtcctgtcttcttcttcctgacgctcaccctacatagcaccaagtgcaaagccaaggagctcaaagccaccacgatcctccacacgggggagttatcttacccaaacctgtcgtggatcagaaaggttttagttctcggaggtgaaattgagtctgggaaagggacgctgcatctccagaggtgaataattccctgaaactaaaaccattgcccgttttctctgattgatggttgctgatatcccctgaagttagttccacacccgaaacccaagccctctggccacttctgcccaggaaatgagagagggcatgcgattcccttggccatgtggccccagctgacatgagactggtcagggatgaaggtgagcaggaaggccctgcctgtgaaattcctggctgagctgattgctgccattgctctagtaggaagtcttgttcctggagcagtgagtattttgtgtctagaatctgatgtggcaaaccaaacatactgcagtttggagcacttggcatcataaaggaagagttctgggcagtgggtgagaaggaattaagggagtggacaccctaagccaccaaagcttccctcctaatgcttccctggctgaagcacaggctccttcccacatctccctccctctaaaagccccagaacccaaccacacagatccgtccatcactcagagatggacaggaaaggtgaggcaggattgttgatggctgctgtcttgcccagggagcagggacgcgtgatgggaccctgataagaaacatcgtttcaaggagcgagattgacttaaatcttatcaaatgtcacttcaagaagatgtacggcaagaccctcagcagcatgatcatggtaagcaggcattcccaatgctgaggccagcctgaaacccagacattcagggaaacctggaggctgtggccaacactacgtgagcccctcccttcccagtgggcaccatgtgcttgcattcatgaccatgtggtgtgtgcagggaacagcagaggtcagtgtggctggatcccaaggggaatggggggcagaggggagatgcagagaccagggcacagaggctcccctgtgtcccactcagaaagttggtttcacatttaagttatggttgctccttggaaaagacaccaaatccttgcagaagaagccacctctgaaaagtcaatgagatgaactagtccggtaggaatcgggcccaccgctcaaatccagatttaagtagtcctggcggccaacttctaaggagataagtcagatgagcgccaatagactatctaaccagattccaattagcaaaagttctggagccttcaaaacacagactgattatcacgctgcgataattgggagaaacagctcttctgggggtgtctgcaaattgaggtcttgatgatttcattagcagaagtcacattaggacaaatgtatccccaagttttctttggctactaagtcaagtctctagctcttctgcaaatgtcgttgttaagtgcacttttcaagaaacacatagctgacaataggtggaaaagacatttctgtttccagatgtttcaagatggcaacatcttgaaacaggtgggcaggggcaagagaggattggaattattcttggtttcacttgaggctccccagccaatcttgtcgggagacaggagggcaaggcacacaccagcctggactgtgctgtcacctgcagacagtctgagctgattgtcattaacccttttaaccacacatggtaacttacggcatcagagagatttctacagatacatgaagccaccctcttcaaattttatctaatgttgttacttaagaaaattgagttagaatcatgaatacattgaccaaacgtttctttttagtgtagaccacagatgtcattaaagcaaaaatggttttcaacactaatatgagttaaaaactcctgcattgaaattaagaggcaaatgtataaacactccaagtataactcatgtatttgaaaaagtaaacaaaattaatgcttttctttctaaaaactattcgaaaaattgtcctcaaaataataaaaatcaccaggcgtagtggcccacacccgtaatcccagtgctttgggaggccaacgcgggaggatcgcttgagcccaggagtccaaggctgccgtgagctaggactgcatcactgcactccagcctgggtgacagagtgagatcgtgtctagaaaggaaaaagttaaaaaaaatttcattgtagtttgaaacccgtaatgagatttcaggctcaaaacaggcaaattttactaaatggtgaaaagtagacaataaccatgagacctaaactggtccagagtgtggaaagtgggtctagccccagtctaccccttactcaccatgccgttgtgaatgaattcactcccctctcttggccccgctgtcctcaactgcatgaagaagaatctgggtgatctgacctggcccatttcccagctctgtatgcagaccccggactagccagtcccatcaggacctaccactatctaagaaacagggctcctcagtcatcggaccacaaggtcagtctcatcaggagacaaacactgtggacccgatgtgagccagatgcagggcagaccagctcgccttcctcctgctgtaccctcaccacgtctcagcaagatgcacagcagcacagcattgatctcatttcatagatgagtcccacagaggtgaaggggcttgcctcggccacaccgtcagggtgcgatggtccaggctccctccacccccggccctgcccccaggtgtgtgctgatgcctcactctcagccttgattcccaagctgccacagcaggtgttgaataatgatgcatcctgttgtgtaaatgaatggctgggcaccctggctcccgaatagaagaaccctgggacagctgaccccttccttgtttaggagtggaactgtctctgattcattttccacatcaatcctgcatgtagttggtaagagaatcaaaaggaaatgtaaaggaatagcctgaaattaaaaacaaggaaagaggggtgatggcacaacccctgcggctaggaaccctggagggccgggccaggtgcaggccaggggcacacctcttagtcataataacacagccgccactgccgagccaggcacaagcaaaccccttctcacgcttatgcgcctcctgcccacaggaagacaccagcggtgactacaagaacgccctgctgagcctggtgggcagcgacccctgaggcacagaagaacaagagcaaagaccatgaagccagagtctccaggactcctcactcaacctcggccatggacgcaggttgggtgtgaggggggtcccagcctttcggtcttctatttccctatttccagtgctttccagccgggtttctgacccagagggtggaaccggcctggactcctcttcccaacttcctccaggtcatttcccagtgtgagcacaatgccaaccttagtgtttctccagccagacagatgcctcagcatgaagggcttggggacttgtggatcattccttcctccctgcaggagcttcccaagctggtcacagagtctcctgggcacaggttatacagaccccagccccattcccatctactgaaacagggtctccacaagaggggccagggaatatgggtttttaacaagcgtcttacaaaacacttctctatcatgcagccggagagctggctgggagcccttttgttttagaacacacatccttcagcagctgagaaacgaacacgaatccatcccaaccgagatgccattaacattcatctaaaaatgttaggctctaaatggacgaaaaattctctcgccatcttaataacaaaataaactacaaattcctgacccaaggacactgtgttataagaggcgtgggctcccctggtggctgaccaggtcagctgccctggccttgcacccctctgcatgcagcacagaagggtgtgaccatgccctcagcaccactcttgtccccactgaacggcaactgagactgggtacctggagattctgaagtgcctttgctgtggttttcaaaataataaagatttgtattcaactcaaa

SEQ ID NO: 50 - DNA, 16003 bp, Homo sapiens
  source 1..16003: mol_type = genomic DNA
agacgtgtggagtcccagcagaggccaacctgtgtctcttcatctccgtgagaaaggtgcccccgaagtgaaagagatggcctggtggaaagcctgggtaagtgggagctggcaggagatttgcgttcctgcatggtgttgggtgctggtcaccagggagtcctgagaaatgtaaagtcgcccttggctgggagtggctcagtctacatttggctgcctcctgggccaagcatggagggtgggaaggggccgagaagaaacagtcccaggcctagagtgcccacggcagggatgggacctgggccgggagacaggctgatgaagaaatctagaaatgcaagggggaagctgaggtttgagaagagtccaggggagggacccttgcaggggtggggccactcaaaggagggggtatcatggttgagccttgtgtgtaaatgtgtatggggtgcacacacgtgtgcatttggggagaatcaggcatactgctcctggcagagggaactgtgtgcagagggtcagagggcggggagcttggctttgagggaagctgctcagcacagctcaagggtcctggtaccggaggagatggacctggggaagcaggcagggccaggtcctgaaaggccttgcctggcaggctgaggagttaggctttaccttaagagaagtgggaaggcactgaagggctttgagcatgagagtaacctgaacctgctgttggggacccatcaatgccttcacctcagggatcaatgatgttcatttgtcaagactggagagggaagaggggaagcaggaggacctagcctgctagagcctggaggaacccggggctcagggcagcccatgcccagcagaactgatgggttctcgggagctttctgtctatggttgagcctgaggccatcgctgtgctaaggagttgaatatccagaaggggacagaggtgacatctcccggctcccggctctgcacacccttttcctttcctcccaggcagcctcaggatgtcagggctgcactttctgttttgcagatgatgaaatgaaggctcagagacactgagtgacttgctagggtccaatggccagcaggctccagtcagagagcagttgggtctctctgcccagccccaggttctctgtgagcttttgtgggatacccaggcttgtacagcttcagggagtctctggatcatagatgtcgcaacccaagcaagtgtcctcagggtcagacatgctaggttctggacaggtgggacaaagaggaagccaggctgaggtggggcagctgtcctggcccccagggaagcagccttcttccaggacaaggggccatggaggcctgcagcttcaaccagactgctgggaacctgcctttgaggaggtggacatggcagggagagcccagtgctgggtggtttccaaagtcagttgctggccaaggcagtctggcactgggccttgcacccagtgcagcaggacaaagggctgtccatgtagggacctgccaaattgacaggatcactgtgacactcactgagtccctactctgtggccggacccttctctaagcacctcacattcaatatctcccttgaacctcacaaggagtctatgaagtagacaccagtatccttatccacagatgaggaaactgaggcacaagtaggctaggcaggtgcccgaactcactagtaagtgtgagagtctaggtgagaatctgaacagcctgactccagggccaaaaccataccctggtcgtccataccccatgtgagagctggctcggggtagcaagttcacaggtagaccccacctgcaacagctgagctgctagcgaagacccagtgtcctctaggcacaaagctgggccaggaacgggatgggaggagatgagggagccactggagagagatctgtctgcaggcagggcccatctgcacctctctttttggtgttgccttttcctctgtgtctctcatagagacaaacccatctcccaggcctctgggcagccacgtagcaggggaaggccaaggcatggcagctcccctgtgcctgtcacagaacaagttatattaatagatgtagtcacaggctggtctgagtcaccttttcagtgaaaatgtgcctgtctggactagcacggccctgggcaagaccctgcaggagcctgaggctgacccttccttctcagcaggaggtctggagctccaggactccacactgatagccagggctccgattcccagaacacttattttctaaaaccttagagtgggaagtgagacagaggcttctcaatgcagcaaaatcagaaccagccagggagctgcttacaaatgctgcacctgagacctaccgcacccctgcgggactgcatgctcctcagggatgtggttacacagcctggccactcgctggtgcaccacagcccccgagtgctggggcagagggaagccggcaggcactgagagctgagatgcctcccacattcccagacgacctgcgttcctgtgggtgaagcttccttcagtggaacgttccaggaacactcattgtctgggaaaggtggagtcatcagtagggcaggggaggtagatagagctcagcttctgagtcaggctggggagtcccaacagcatcacttactagctgtgtaagggagtccagctccctttctgtaaagtgaggcatcagtacttacctagcacaactgttgaggaagccatgacataagcattgcttctaaagcacctggcccaggtctggcacacacaaggggcttgaagtgctaacaggagtaatagcagagcgtgactccacaagcaagggatatcgtgtgtgtggacaccgatgagcaatatctgggaccacactggctctctctggatggaatttccataggaattatttctaacaatttctgctgtgaaacatggtgctaagaaatgactcaggaagatctgtcaccagacatttgaaattaaagcaaagagttcagaaagatgccttacctcttactcaaaggaaagatacttacagatataccatccattggaatctctgtattttcacaatctaacccagggcttcgatggatggatggatggatggatggatggatggatgggcgggtgcatagatggatgggtgggtggatggatggatggatgtggtagtcaaatgggtaagtgcgtaggtgggaaagtagatgggcagatgatggaggtgatggaaggaataagtgaacaggtaaatggaagacaagactggatgggactaaactctttttcatcctggaggatctctgagtctccctctaattcaatacctatctccaatatccctccattctctaccattcctccacccaaaacacacttatgtccatgttaatcatctgagaaattctgcagggcacaagtttaaagagccctcaggcaagccctgaactggaggcttggaaatcaagggctcaggcacttggttatctggtttatttcacaatctgcagagcatcgtgcgggtttttctaaacctgacgctctgagccccatgggcctgtggacttgcaaacaccctgaactatcaatatgctcagctgggcccctgccctctaagttgctgtaagtcccaactccccaggaagagggcagactgagctcaaaccattcctcagaaaggcagaaccatgctcagccttccaacctcatctgcacactctgaaggtggtgcatgcagctccaggaagcctttgcttcagtgttctttcccctcctaactttgggtgagtttgtcccttcctgctgctggtgggtgatgctggaaggagctgggtgtggctggggctgctgtctgcagtcagatggcacagacagggacaggaaaggttttgtggcttctccccacaagctctggctctggctactccaccctgttggccaaggggctgaagggcagagcactggcctgcaagggctgagcagatctccgtgcccagggaaggggctcaccctgtcagggcgggctaccagatgggctgggagcctgctctgccctccctgtccctgcctgctttgagcaggcctggttctcttgcagattgaacaggagggtgtcacagtgaagagcagctcccacttcaacccagaccctgatgcagagaccctctacaaagccatgaaggggatcggtgagtgggtgttggcagccttgccacctctgctcaagacccctccgctcacagccctggaaagcgggtgccaggggacatctggggagctggggtgtcccatgatactctgaaactgattccactacccagagaatcacacagccctctgtttctgcagtgaggtcagcacccaccctgcaagactggacaggagggtgctgctcttccctgggtaatgggggtggggaggtgagctgtgtgtctctgtgagtgacttcccatcagtctcagctttctcacttgtaaagtggccccaagaattcttggccttgtgtgtcacatgaagtgtgaagggggtggtgctttatgatgccaggcacagagctgccaggggtgtgaggtgttgggagtttgtggggctgattcaaggcccccttgccccatgtcgatggccatggagccggctcccttcccatctcctgcacttgcccagtgctgccctcagcactaccgtgagtgggcgagggctggcctgaggccagatttaaacagcttgcccagaaagccctcctgacctgagagcagagcatgtaccctgacctcaccccaggtgggactgaccccttagccggctctgcctgaggatcaggggccttaatgagaactgccgctcctgacaagcccagaaaacgttctcatgccctctgctttctgtgaagcagaaagttatctccacttcccaaatgagaaaacggaggcccagggaaatgaggctggctgcccaatgccacgcagttgctgggccaggcctcggattcaggggttggactcttagtcttgaccttcccctactgcgaccaacacaaaggagggcagggccagagatctcactcggccaagctccaaaggcccgggctgatgtccagagccacccagacctcagattccatcttgtgaggctggccttgggcacgccccaacattgtgggggtgtggggtgggaaatggggaggcagatttcctaagggtcttgtttacaccacgaaaatggtctgggggtttggaactatccaggtgtcgggtcccaactgctcagccaccaagcagctgccttcgccttcccctcctccgccctcaccagtgtgtcaccctgggggcagcagggtcacttgtgctgtaaccctgcagggaccaacgagcaggctatcatcgatgtgctcaccaagagaagcaacacgcagcggcagcagatcgccaagtccttcaaggctcagttcggcaaggcaaggggaaggctggtgggggtggggataggtgagccttggggttgggggtacagcctgggaggcagctccattctggacgactttcccctagagccagcccactggtagcatgggcacatggaacctgtttgcatgaaaacaattgttctttattgaaattcaaatgtaactggctgccctgtgttttatctggcagatctacttttaggtgtcagagcccgggccgggggctggccttccttgcttcctttcctgcctcttctctcacagcattccttctcatgcacccaacaggccccactggaggtctgtctccctgcccccaggctatctcgccctgccctctgagcccagaccaccttctcttttccatgccccaggcatgcaggcctggctttgctctgttctggggcgtgggcatgctttcctcagtcgagctgcttgcacccacacctcgtcccttctgccacctgggaattctaagagcctggagtaagcatgccaggccctttgtttctcctcccacctgcactccacccctaggacaaagcctgacatttgggggtacacagtaaacacaggattaaatatgtgcacagccatggttgcctcaagcctctagtgactcatatcattagtttggagatgtaacgaaggaagatcagctcaaatattctcttggagaacccagtatgcatttttacagtttccctctcttagtcctcacagtgatacattctttgtattcaaacatttggggaaactggcactcagagaggttttaagttgcccaaggtcccagagcctgtaatcaacaaggtggggattaaaatccaggtctgacaaagcccttgatctctctgctgctctgtagatcagctgatgtagcctggtggctcctcgtagcaacatgtgaccttagaaggaggcacatgtgagacgaagtctttaattcaggcatgcattcattcattgagtgccaagtgacaggtattttatggtgatgccatactcagagcttgcagtctagctagcaataccaatttcattttactgagagcttatgatgtgcccagcactgcactgaatgctgaattgagtcacacacaaccccctaagcaacgggatgaagcaggagcacgtttctctccgtgtaaccggtaaagatactgatgctaagagaagctaaggagctggcccaagaaacccagccagcacgtggcaaggcccatgcagaatccagcccaagcccctggacccagccaccactccgctgcctgcactcaggtgggcctggcttatgacaaatatcacctttccctgttcccgcattaggacctcactgagaccttgaagtctgagctcagtggcaagtttgagaggctcattgtggcccttatgtatccgccatacagatacgaagccaaggagctgcatgacgccatgaaggtaaccaggcagacagggcaggggagtggcaggggtgctcacatgactgggtaggggcaatgcggggaccgggaacctacagcccagagctccccttgagccactgtttggaatggccatatgggccataactgggcccagtgagcaggcagcctgctgctcagactgcacccaacacctggagtcactggtgcctgattgacacgttgagtggccgtgatgaagccaaaatcagtacttctcagaacctcacgagctcaggtgtacagtggtattggaaacccacctctacagtcccaggcacagccccttgggtttccctttacctctcactactctttgcttttgcagattaataaggatggggacccagtaactatagtcattttgtttggaaagacacttgctgcatgggcactgccaggcattttacacccacgctccctaatctatctttggcgcaggggaggcttcttattcctgtttatggatcgggatgcttaggctccaggacatggagcagcctgtctgagaccacccagctaaggagggagagctgagacagggcttccccgtcacagcacttgccctcaatgttcatcactgaagacaagcatgtgattttctcatcacatcctcccacttcaagtggggcagggcagtgaggtccttcctgaggctcaggcatcttgagaaaagaaggtgtggacagagcagaaggtcatggcagagcactccagcaggcagaggtttctgtccacagggcttaggaaccaaggagggtgtcatcattgagatcctggcctctcggaccaagaaccagctgcgggagataatgaaggcgtatgaggaaggtaaggggtggcacagatggaggggctcaggagtggccacaagctttggcagcctggcagggaacaaggatcaagaattaacctgggccacactagaaaggaccctttggggacttttttacccacaggtgctgagcacctaccgtatgccaagatctgtgcctgatggtgacactgaacatgattcagacttgatctgtaagctcaccagctcctcttacaggggagagaggcctgtgaccaactaaaatctctgcccttgaggactgtggtagtagggggtgtggaccccaggctagcagaggccagtcagtcctccacatcatgtacctagtggggagttttcctggaggctttggctttgccaagccttgagatgaaatggagcttggttggcagcccctagcctggctctctgacctggtccatcttgtgctttgagcttggttgggtacgcatgtcgcttctagttgtgaagcaccacccaggcgacagccacttggacacccgggcattgcatccatgccctgtgccaaggactttctttcctagaaggctttaataaggagaagtatggggaacagggctggaaggaggaaagcaggccccgggtaggctgtgggcctctgcttgtgcctcatggtcctgtttccctgcagactatgggtccagcctggaggaggacatccaagcagacacaagtggctacctggagaggatcctggtgtgcctcctgcaggtgtcacagcctaggctcttgggagtgccttggtttgggagtcccaacagctccaccccagggagcagcccttgaatagcgccacaagagtcagggtatgggcatgggatagcccagcagccagggctcattgggtgtgtctcagcatggttagagggtcccaactgcagagcccccacacttgtccttactcagccatgtgagagcatcctggaagcgggaggagagcaggtccttcgtgcagacctcatgccaggcactttgcttaccttagctcactgaatccgccaagccttatgaggcagtccttaccacccccgttgtacaaatgaggaaaccaagggctgaagagaataactggcttgtcgaagtttccacagccaaagagcagcagagccatgcctaccctccaagcccaggatcccccctgtgcccttaatgctctggtcagctggcctgccttacagagccacctcctctgttcctagggcagcagggatgatgtgagcagctttgtggacccggcactggccctccaagacgcacaggtgaggctgcgcccagccggccatgtggccccaccccctgccatctggactccggctcctctgcccacgggggctttctctgacactgggctgggacccacccagctcagctccctataggcctttgtcctgtggtgtctggggaggagagtgagggtgttgggagactcgggaggaaggagtgtgacttgggggtgggggagcactaaagctctgtcctggcaggaacagcccatgaacccgggggcgctaggccccagtgctggacacaggtgtccgggtctctgtaggtctgcctgctggcagagggaagtctggggaccaggcagttcctagagcagcttgtggcccaggatagagaaaatattctaagccagagctgctagagaaaggggagctccctgtcagagacgaccaagcaggggagcatgctggcctggcagagtggacagggccaggccatggccacagctctgggactctggggctcagtccctcacctccctggtctccctcactggcttattgtgggtgtcccaatgctaggatctgtatgcggcaggcgagaagattcgtgggactgatgagatgaaattcatcaccatcctgtgcacgcgcagtgccactcacctgctgagaggtaccagggagggaggggctggggccggggccacaggggtgtcctggccatgagcctctccctcgtgcttctgccttgtcaagtctagagttagggagagagccagggagcccaggactgtttccccagccaccagtgggaggtcagggcggcaaattgatgtgcgatctctgatccgagacactgaggggcatcacgaggaggtctgaccatcccctgagcagagccctctccacagtgtttgaagagtatgagaaaattgccaacaagagcattgaggacagcatcaagagtgagacccatggctcactggaggaggccatgctcactgtgggtaagagctcagacttgcacgtttttcaggccacagggctcaccgtggggcagcaccaaagaacaaagggcctagggatgcgaccacaagagaaagaatccctgtgtcaccttcacgggatgtccccccgactcacactctgcctgtctccctcacccagggactgctccacctctagagtcccagtgtgtgctgccaaagattgttctctgtgctgcccacgtggtgcccagtgctgtgtgggtgtgtctgcatgagtgtgtgtgtgcgtgagagtgtgtgtgcctgagggtgtgtgtgcatgactgtgggtggaatgtgagtgtgtgtgtgtgagacagacagtgtgtgtgtgtgcgcacacaaatgcatacgccagtgattatgccagccccaaccctgtgtgtactcatggcagccatgcagggagcactctggctgtggttgtgaagccctggccagcacaaagtcatctttctggacatgaaccaggggcctggcccctgccttcattgccagttgaagaaacagtgatgtgtggcttgagtccaaactgagtgacggatggtctgatgctgagaaacactggggatcttccccacagcaggaagtcagggccactcaggaggacccactccagagctctcatgggttccagggctgagatcacaatgggaagagtcactgcagagtaaagagctgaggcccagggcagagggacgtctcttctcccacttacacacagagcccaggtccggactcctggcctgcagctctcacctccacaccaggctgcctccgtgcaaagccagcagccagcaggctccctgctgtttcctagcctctctgggtggacagggccatctgagacaccccagctggccttggatgctgtgatacaatccggtctatgtcaggacatctaatcacacccctgctccaatctcagcttccacccctggatctggcctgaacccaccaagaatgaagtctgccagcagggaatagtgaagccatgcagtgctccgtcatgctgggccttcctattcacttcaccttgaagcctcgcatcagtctcacttcccagatgagtcagggaggttgagtaatgaagccatactgcaccatcaaggcaggaagtgaacacatgcctacctcactcaaagcccatgctccttctgcagccctaagtgaaaatgccaaccttccccacccagatgccaagtctctgagcagtacccatgggagcaagcatgggcccagtctctggaccagacgcccccaggtgccttagtcctgtggggccaaactccacttgtcacatgggaattcaaaatgcagggtttctgctgataagtgtgagagagagggcactctgaggccagcagccaccatcccatggtgcttctgtggagctgagaggctggatttttggtggaggtgtctctgggttgagagcccagggcctgtcctgagtctgagctgcccttggatgggcttgagctggtgtcttcagacgagccccacagtctggtgcatttcacatcttacccttttgcctgcctgcttgggcctttggagctgtgcccagtgccccgggctaccttccctgtcccacgccacctgacacaaagcctctcacattgggaaaggcacggaacaaagaaatatgccaagccttgcacaacactgactcttaagacctaaggcaagacataaagttgtaggcagtgccacctaccagctccagacattaacacagctttcttgtttgccagtgaaatgcacccaaaacctccacagctactttgcagagagactctactatgccatgaaggtaactgtcctgtcttcttcttcctgacgctcaccctacatagcaccaagtgcaaagccaaggagctcaaagccaccacgatcctccacacgggggagttatcttacccaaacctgtcgtggatcagaaaggttttagttctcggaggtgaaattgagtctgggaaagggacgctgcatctccagaggtgaataattccctgaaactaaaaccattgcccgttttctctgattgatggttgctgatatcccctgaagttagttccacacccgaaacccaagccctctggccacttctgcccaggaaatgagagagggcatgcgattcccttggccatgtggccccagctgacatgagactggtcagggatgaaggtgagcaggaaggccctgcctgtgaaattcctggctgagctgattgctgccattgctctagtaggaagtcttgttcctggagcagtgagtattttgtgtctagaatctgatgtggcaaaccaaacatactgcagtttggagcacttggcatcataaaggaagagttctgggcagtgggtgagaaggaattaagggagtggacaccctaagccaccaaagcttccctcctaatgcttccctggctgaagcacaggctccttcccacatctccctccctctaaaagccccagaacccaaccacacagatccgtccatcactcagagatggacaggaaaggtgaggcaggattgttgatggctgctgtcttgcccagggagcagggacgcgtgatgggaccctgataagaaacatcgtttcaaggagcgagattgacttaaatcttatcaaatgtcacttcaagaagatgtacggcaagaccctcagcagcatgatcatggtaagcaggcattcccaatgctgaggccagcctgaaacccagacattcagggaaacctggaggctgtggccaacactacgtgagcccctcccttcccagtgggcaccatgtgcttgcattcatgaccatgtggtgtgtgcagggaacagcagaggtcagtgtggctggatcccaaggggaatggggggcagaggggagatgcagagaccagggcacagaggctcccctgtgtcccactcagaaagttggtttcacatttaagttatggttgctccttggaaaagacaccaaatccttgcagaagaagccacctctgaatagtcaatgagatgaactagtccggtaggaatcgggcccaccgctcaaatccagatttaagtagtcctggcggccaacttctaaggagataagtcagatgagcgccaatagactatctaaccagattccaattagcaaaagttctggagccttcaaaacacagactgattatcacgctgcgataattgggagaaacagctcttctgggggtgtctgcaaattgaggtcttgatgatttcattagcagaagtcacattaggacaaatgtatccccaagttttctttggctactaagtcaagtctctagctcttctgcaaatgtcgttgttaagtgcacttttcaagaaacacatagctgacaataggtggaaaagacatttctgtttccagatgtttcaagatggcaacatcttgaaacaggtgggcaggggcaagagaggattggaattattcttggtttcacttgaggctccccagccaatcttgtcgggagacaggagggcaaggcacacaccagcctggactgtgctgtcacctgcagacagtctgagctgattgtcattaacccttttaaccacacatggtaacttacggcatcagagagatttctacagatacatgaagccaccctcttcaaattttatctaatgttgttacttaagaaaattgagttagaatcatgaatacattgaccaaacattttctttttagtgtagaccacagatgtcattaaagcaaaaatggttttcaacactaatatgagttaaaaactcctgcattgaaattaagaggcaaatgtataaacacttcaagtataactcatgtatttgaaaaagtaaacaaaattaatgcttttctttctaaaaactattagaaaaattgtcttcaaaataataaaaatcaccaggcgtagtggcccacacctgtaatcccagtgctttgggaggccaacgcaggaggatcgcttgagcccaggagtccaaggctgccgtgagctaggactgcatcactgcactccagcctgggtgacagagtgagaccgtgtctagaaaggaaaaagttaaaaaaatttcattgtagtttgaaacccgtaatgagatttcaggctcaaagcaggcaaattttactaaatggtgaaaagtagacaataaccatgagacctaaactggtccagagtgtggaaagtgggtctagccccagtctaccccttactcaccatgccgttgtgaatgaattcactcccctctcttggccccgctgtcctcaactgcatgaagaagaatctgggtgatctgacctggcccatttcccagctctgtatgcagaccccggactagccagtcccatcaggacctaccagtatctaagaaacagggctcctcagtcatcggaccacaaggtcagtctcatcaggagacaaacactgtggacccgatgtgagccagatgcagggcagaccagctcgccttcctcctgctgtaccctcaccacgtctcagcaagatgcacagcagcacagcattgatctcatttcatagatgagtcccacagaggtgaaggggcttgcctcggccacaccgtcagggtgcgatggtccaggctccctccacccccggccctgctcccaggtgtgtgctgatgcctcactctcagccttgattcccaagctgccacagcaggtgttgaataatgatgcatcgtgttgtgtaaatgaatggctgggcaccctggctcccgaatagaagaaccctgggacagctgaccccttccttgtttaggagtggaactgtctctgattcattttccacatcaatcctgcatgtagttggtaagagaatcaaaaggaaatgtaaaggaatagcctgaaattaaaaaccaggaaagaggggtgatggcacaacccctgcggctaggaaccctggagggccgggccaggtgcaggccaggggcacacctcttagtcataataacacagccgccactgccgagccaggcacaaacaaaccccttctcacgcttatgcgcctcctacccacaggaagacaccagcggcgactacaagaacgccctgctgagcctggtgggcagcgacccctgaggcacagaagaacaagagcaaagaccatgaagccagagtctccaggactcctcactcaacctcggccatggacgcaggttgggtgtgaggggggtcccagcctttcggtcttctatttccctatttccagtgctttccagccgggtttctgacccagagggtggaaccggcctggactcctcttcccaacttcctccaggtcatttcccagtgtgagcacaatgccaaccttagtgtttctccagccagacagatgcctcagcatgaagggcttggggacttgtggatcattccttcctccctgcaggagcttcccaagctggtcacagagtctcctgggcacaggttatacagaccccagccccattcccatctactgaaacagggtctccacaagaggggccagggaatatgggtttttaacaagcgtcttacaaaacacttctctatcatgcagccggagagctggctgggagcccttttgttttagaacacacatccttcagcagctgagaaatgaacacgaatccatcccaaccgagatgccattaacattcatctaaaaatgttaggctctaaatggacgaaaaattctctcgccatcttaataacaaaataaactacaaattcctgacccaaggacactgtgttataagaggcgtgggctcccctggtggctgaccaggtcagctgccctggccttgcacccctctgcatgcagcacagaagggtgtgaccatgccctcagcaccactcttgtccccactgaacggcaactgagactgggtacctggagattctgaagtgcctttgctgtggttttcaaaataataaagatttgtattcaa

SEQ ID NO: 51 - DNA, 18329 bp, Homo sapiens
  source 1..18329: mol_type = genomic DNA
aaaagagaaggtggatggagaaggggaaactgggcctcagccagcaccgggatgatgcgaccagctttgtcagcacgcttggggagcatacacaccgcttgccttggctggaccggagactgtgatcaccacccttccaacccatcccccaacacgcaggctggcatggccacgcccacagtgccccaagtgctgcctgccttgcagtgactcacttcctctgtatgggctgctgaactgtcccaaggagaggacaggccatctccaggccttcagccccgagtttagatatctgggcaggctttgtggatgggcaagcatacagggagcccaaatgtggaaggtaggttttttcaggtcaggtggaactgttaacactgaagcctatttgggtaagaagcagagcctagctagtacctaatggagattcaggggccaggagtatcggggaggaaacatttcctaacagagaggtaaaatagccaagaggagtttctatgtattctgaaatcaggcaatggaaagtatttgcagaaaagcaatgtagggaccaggcgtggtggcttatgcctgtaatcccaacactttgggaggccgaggtgggtggatcacctgcggtcaggagttcaagaccagcctgcccaacatggtgaaacctcatctctactaaaaatacaaaagttagctaggcatggtggcacatgcctgtagttccagctactttggaggctgaggcaggagaattgcttgaacctaggagggtgaggttgcagtgagccgagatcatgccactgccctccagcctggcaacagagtgagactccatctcaaaaataaataaaaggctgggtgcagtgattcatgcctataattccagcactttgggaggccgaggtgggcggataacctgaggtcaagagtttgggaccagcctggccaacatggtgaaaccctgtctctactaaaaatacaaaaattagctgggtgtggtggtgggccctgtaatcccagctactcgggaggctgaggaaggagaatcacttgaacctgggaggcagaggttacagtgagctgagatcacaccactgcactccagcctgggtgacagagtaagactcggtctcaataaataaataaataaaagcaatgtgggacttggaggctgaagaggtggacatgcatgaacagtggaggcggtgtatgtggctgcctttcccctgtattccactgagagggagcccaaatctgcctcgcctgcattgagggatgaagaaaacactgagaggcagctgagaaacatggatgctagttccaactccatggcctcgggaagtcactcagactccttgagtcagtaatgaaaaggtagtagattagaggctgggcgcagtggctcatgcctgtaatcccaacactttgggaggccgaggtgggcggatcacaaggtcaggagttcaagaccagcctggccaacatggtgaaacactgtctctactaaaaatacaaaaattagctgggcatggtggtgcatgcctgtaatcccagctactcaggaggttgaggcaggagaattgcttgaaccagggagtcggaggttgcaatgagccgagatcgcgccattgcactctaacctgggcaacagagtgagactctgtctcaaaaaaaagaaaagaaaaggtggtagattagatcctctctaagatttcctccaactctgcaattctaaaatgtacaacatggggaaggaaggtgatcagtacaactgtaaacaactgcaatccggccctgaagttgaacaaaacaaaacctagggagaggaatgagtttgtagcaggtttcaatgcagcgattgtgaacgcatcacacacacactcctcacaggcaaggacttcgcttctgccatgtgactgagactctgttggacttctccaaattcagagttcagcctggcatgccggccaggagccccttggagagattcggcgtgaggaaacaggaggcctcacgcttccttcggttctccctaaatctgctgggcaggtagccagaagaaactctgaagggtacagaaagccgagggccagggggaccccggctgcggagctgcagtaccgtgtttacccagcctaactgcggtcacccagtctcctgcatgtgtctgaggtcagcctcgggggctcccctgagtaggtatctacctgaggctcttcccctgatgctacctgcataccaattccacccaggaacctggcgtcctcaggaggctgcacttcccaagtgggctgagacagccccttaatatgtggggctggagccagagacctcaaggggccactagggggctcgagactctcagtggctgctgacgccctcttgtggccattttggggattggccagaaaagtttcagaagcgagccaagatcggaattcttaaggaggtaagtaataacaacagtaacagttaccatataacaatacttatcgttatatatttgataacattgtgacatttctacttaacagcgctgtgcccagaactcttctaagtgctttatatgcactgtagttatttaattctcacaacaacctataacataaacactattacttgtctgttgatgatgaggaaactgagcacagaatagttgcccaaggtcacacagaagaccagaatcccgactctgagaagtctggctccagaagctttgcttttagccaccacgctgagactgagttccattttggggttgtcaggtgaaatacaggacacactgttaaactataatttcagataaacaaaaaataataattacaggcggtggctcacgcctgtaatcccagcactttgggagtccaaggcaggtggatcacgaggtcaggagttcgagaccagcctggccaacatggtgaaaccctatctctactaagaatacaaaaaattagccaggcatgatggcaggcgcctataatcccagctactcgggaggcggaggcaggagaatcgcttgaacccgggaggtggagcttgcagtgagccaacataatgccactgcactccagcctgggcaacagagagagactccgcctcaaaaaaaaaaatgttagtatatttaatgaaatatttgggtcatacttgtaccaacaaatgattcctcatttacgtgaaattctgattaagctgcatgtcctgtatatttatttatttaatctaatacccctactttacagggcacttttctctgccacatgcaattacacagattactttttttttttttttttttttttgagacggagtctcactctgtcgcccaggctgtggagtgcagtggcgccatctcagctcactgcaacctctgcctcccaggttcaagtgattctcctgcctcagcctcccgagtagctgggattacaggcatgcgccgccatgcccggctaattttttgtatttttagtagagacggggtttcactgtgtaagccaaggctggtctcgatctcctgcctcatgatccacccgcctcggcctcacaaagtgctgggattacaggcatgagccaccgtgcctggccacattaccttatttatttatttatttatttatttatttttatgagttcaatagtttttggggacaaggtggtgtttggttacatggataagttctttagtggacacattacttcatttaatcatcccaggaaacctgtcctcggaggccccagcatgtcccacagcctccgtctctctcaatcctcccatttagagagctgaaaggactagcgaagcttacagaacataggtggcagagctggatattgaaccctcattctccagttctgacacaggtgcatgttttccttttaacaggagagaaaagtgaggagcagtgattaccgccacagaaatatcctttcatggcgtgtcctccggcatggtctactcagtgtggtggagccactgcaggtccctcctccagggatgtaggaatgccagtgaaggccttcctgagttgggagagaggcagaggagtgagtggaggcagggctgtagcttctgtgccccgcccctacccaggctctccagggaggcaggaaagaggctgtgtttagacctgagggagccagctgtgaggctggagcagttgctgcatggcggggcgggggctccacagggctgttcacctgctgctctgtgcagagacagcctcaagtccagctgctggggttgcatcacctgcagctaaaacagccacagggcccaggctgccaaaaggcaacagaagcaatctaagaaaccaggcaagggagcctcccccatctccctgttgccttttgggagcatagagcttccctctgaaggtaacaccctttgcatttttctctcttgactctgttcatcaacttccactcccaaatacttgtgcccttccttctccacagatatacacaatccctgggcactctccacctaggtcagctggctctagtaaggcagcagtcaagggagtttctgggctgggaccccctctggggtgcaggctggggtgccctgctggtatgtgccccaacaggtttttccctatcagccttgaaatcagcctgcagcctgtctgacctgccccccagggagctggagccagaggcagagccaggtcagaagctggggcagagccaggtcagaagctggactttgagactaggtctctgtggtcccacctggacccacagggaaggcagtgcataaaagcctcctgtgtttgaggctgagccgctgagaggctgagtggagttcactcacatggattgaggcccagttcctgggagaagagatgctgggcaggaaggtgtctgcatgtgggactctgtacagcccggtcctctcccacgtctgggaggggccagagtcagacaactgctgggttcgtccctaagagaggtcatctgactggctgttcagcctaggctgcacacacccccactttcctctaccaggccacaccggaggcagtgctcacacaggcaagctaccaggccacaacaacgacacccacctcacctctggcacctctgagtaagtactgggcccacggccccatgccaggagggcttgttgattgcttgggggagggaaaaatgagttttccttttccaacatgagagtgcctcctttctgtccaggcatccacgtacttgcaagaactcttgctcacatcagctaagagattgcacctgctgacctagagattccggcctgtgctcctgtgctgctgagcaggtaggcagctgtacaggcaggaattgagggttgcttgtcagctggggctgccggtgggggaagatgctatttcgagttgtcttccactctgcgtggttaatcctgccacctcacctcagctcccctgcactgcccaggagaccccagccaggcccaggaaggagggccatagacctcagaagggaggcatctaccgcggaccaaggcctgaggagctttggtgctgaccctggcatcagggagggttggcgcctggtccaggagcattccgcatcaatccccacttcctaaaggagtggggagaggtggggaaggtgggggctcccctcttacctcaccatttcagctccatttctggctccaagcctaagcaggttgatctttttttctgcagcaaggaaaggaacaggtgactggaacccagggtccagggtctcgggggggtcataaggagtccctgaagggccaggaaattcagctctgtgggctcctgtttccttccccagggcaaccagtagcaccatgtctgtgactggcgggaagatggcaccgtccctcacccaggagatcctcagccacctgggcctggccagcaaggtaggggctgttgggattttagagatcacttttagtatctcagctcgggctgtgagaggatgggaggcaggaaagtggaggacaggccctgaggttatgctgaggaggtgtaggcagcctggccctggcccttgccaactaccctgtgctcccacagactgcagcgtgggggaccctgggcaccctcaggaccttcttgaacttcagcgtggacaaggatgcgcagaggctactgagggccattactggccaaggtgagcccctttcccccggcacttgagactgccttttagagccaatctgtagaccaaggaggagccaggaaggaggaactagtgatgttggagaaatgtttgtggaatgccttcattcttgtatgtcaggcgccacagtaggtgtgtcaaacccattctcacaacacccctgtgaggcaaggcttattatttccattttccagatgaggaaactggggctcagggagattaagaggcttgcccaaggtcactcagctcatgacggaggtggtattctcatctaggtcagccgatccccccaagtcgtatttttttttaaccaccacaccaggccacctttgccttggtctgggtcagatttgcatgctgttttgacattttatttgcaacttcttttgagataaaatggaagtgggggtgatatagcccctgctcctttccttcccagccctctcctggagcgccttccctcctccaaggagtaggaacatcccactatgtaaagaccctgctcacagcacagccctcatctcggttcaggcgtggaccgcagtgccattgtggacgtgctgaccaaccggagcagagagcaaaggcagctcatctcacgaaacttccaggagcgcacccaacaggtgaggccatgctgacctcccacagcagtggactggggtgagaaaccccctggaggactcgagagacagcaacagccgctgaggccagcccctgcttcctggctaaacagggcctgagatgaaaaccagccaaatcttcccaaacctccccacacttctggggcccttcccctcacccccgtccctctgctgtgaggaccatttattgtaggacctgatgaagtctctacaggcagcactttccggcaacctggagaggattgtgatggctctgctgcagcccacagcccagtttgacgcccaggaattgaggacagctctgaaggtagcaggaggggagacttgctggggtgtctggggaagggagaaggctgtcagccttgcttttgcaagacgagagtccccctctcgtcgtcccatattgtttcttagaaggagaagcagccagcgtctgcccctctgtctgccatcctaatgacacggccagtctgagagtagactcccaatttcttgtaggcctcagattctgctgtggacgtggccattgaaattcttgccactcgaaccccaccccagctgcaggagtgcctggcagtctacaaacacagtaagaatatagagggaggggtcccagatgctggagaaggggctgtaggacaggccactcctctcctgtactccccataggtgagctatctggcaacctggctgcctaagttctattcccttggggtctttcctcttgcccccaccagtgcctcagtctctcaggggagagacccagatgtgatcattaaaaaaagagaagcaggccaggtacggtgactcatgcctgtcaccccaacactttgggaggctgaggtgggcaggtcacttgagcccaggagttcaagaccagtcacaggcaataaaggaaaacctcatctgtgctaaaaattcaaaaaaaccagctggtcatggtggtgtgcgcctgtggtcccagctactcaggagtttgaggtgggaggatcaccccagcttgggaagttgaggctgcagtgagctgagatcgtgccactgccactgcacaccagcctgggtgacaggagtgagagcatgtctctctctctctctctctctctcacacacacacacacacacacacacacacaaataaagagagagaagcaatgattaaccatcttaatctggagctccaaggcagattccaaagtgacagtcccaaaggtactcatgtcaccttcccagccccttgccatccctgccatcacaccacattccaagctgaacccagccatgctgcagcctgaggaaaaggtgggaatctgccctctgagtcatgggtgtcacctttcatgtccctgatggctggccttgcttggctacaagtgtctcacccactaatttgtggctttttcccatcctcatcttaccaccccttccccccacccctacctctttttcttgctttccccaattttcctttgatgtctaatcttggcctatgttcttcttttgagacaaggtcttgccctgtagcctaggctgtgcagtgatgtcatcatggctcactgcagccttgacccttctgggctcaatcagtcctcccacctcagcctcctaagtagctgggactacaggtgtgccaccaccatgcccagctaaattttgtattttttgtagagatggggtttcgctgtgttgtccaggctggtctcgaacttctgggctcaagccatctcctgcctcagcctctgaaagtgctgggattacaagcatgagccaccgccctggccgtggcctatgttcttaatccctctcctaccttccttccttcttgcatctgtttcccttttctctttctttttctccctttcctgctcttttccttcctcatatcccacctctcatatcatttttccttacctccaatgagggtgccaggtcctaaccatcttgtgttataatacgggtttccctagctcttcttcactgcctggccccaactctaataatggttgcctcctgcccagcaggttggtgcttggtgatgaagccactgcacacctcacaacttagagatgtttttagagtggccgtgatggtacttgtgccttacatcctgggaattagcagccatcaagctactccaagcaggggctagcagggctggcagggtatagcgggtcaggcatttggcaggtcctggggatatctacactaggaaaactcaggaggattcagagagctcctcaccccaccccagatttccaggtggaggctgtggatgacatcacatctgagaccagtggcatcttgcaggacctgctgttggccctggccaaggtgaggaggactgacctgcaaggaagggagtcacgttcaccaggcaaggagacacgctggagcagggagcattgctgtcctgtaatggacaagagagggctttaggggagaccagccttcgcttgttggtctgaagataaaaaggtgcccttcaaagagccctctaagaacagtttctcctcctaggggggccgtgacagctactctggaatcattgactataatctggcagaacaagatgtccaggtgagcagggggtttaggagtgtgcacagccgccatgcacataagatgccttcctccaccatatcttagagccggtgacctacgtgcccatttttcccgcaaacccatccctgccttggagagggagttctcagttatgtggtaggggcaggaggtgtcaggtagcgtcatagctgaagccttttcactcatctagcctctgactcctgagctcatcaactgacatattctcctctcatgagcgtttgggggcagaaagcctcctcagaccttttggggattatttaatcctcgggtaccaggatttttccaaatcagtgaatagagctgtgaggctgtaagggcagagccctctcttagccctatttctttcttaaaaaataaaaaacataagataaaaaaacataaataaaaacaactagtaggccaggcatggtggcttatacctgtaatcccagcactttgggaggctgaaacaagaggatcacttgagcccaggagtccaagaccagcctaggcaacatagtgagactctatctccacaaaatatttttaaaaattagctgcacctgtagttccagctagctaggaggctgaggtgggaggatcgcttgagcctgggaagttgaggctgaggtaagccctggtcatgccactgcactccagcctgggtgacagagagagaccccatctctctcgctctctctctctctctctctcacacacacacacacacacacacgcacacacacaaacctagtttacgggttaaaataaactttctggctggtcgtggtggctcacacctataatcccaacaatttgggaggccgagacaggtggatcacttgaggtcaggagttcgaaaccagcctagccaacatggtgaaaccccgtctctactaaaaatacaaaaattagccaggcatgatggtgagtgcctgtaatcccagctactcaggaggctgagcctggagaatcacttgaacctgggaggcagaggttgtggtgagctgggatcacaccattgcactccagcctgggtgacagaatgagagtccttctcaaaaaaaaaaaaaaaaatccttttccaccctcaatcccatttccatcatgatgatgatagattctggaacgtcatacccatggctccctaggccccaaccaatgatcctgattgactcctccctgactcattcctccctcctaggcactgcagcgggcagaaggacctagcagagaggaaacatgggtcccagtcttcacccagcgaaatcctgaacacctcatccgaggtacacacaagccttcttgtccccctagcttgctctaatgatcagtttgggctgaggaaggtggggagggcccatcctttccagagataattaatcccccatccatctttctaactgcctcctacacacacaagtgtttgatcagtaccagcggagcactgggcaagagctggaggaggctgtccagaaccgtttccatggagatgctcaggtggctctgctcggcctaggtaggggcctgctcaggatttgtgaagtaagtctctcttgggatgggagattgtggtcctagttgtgaacctccatccttccatctttgtttccagcttcggtgatcaagaacacaccgctgtactttgctgacaaacttcatcaagccctccaggtgagaggggcactcctttccctccccagaacagaaactggggaggagagaggaagtctcagcttgctgcttatgtaaccatcctatatacaccgtctaaacctcaagccgctctccttcccagggcttacacaccagggcttacacaggggtggaggaatgagctgtggtgagaactaacttagttggctcccaggggccctgaaactaacattttggccttgttaatgtctaggtggccaaatagagatatgaatctgctctgtaagacagtgccttgtgcaggcttagttgttgccagagtgatggtgataacactagcaagaataatgacaagggctggcattttgcaggtgctgattgtgtgccacagcctatcctgagcagggcacacatatttcaattaatcctcacaaccatatccatccgtatcttatagatgaaaaaactgaagcccagagaagttaagtaccttgcttgaggtcacgtagctagtaagttatacagtctccctacacaacacttcacgatgtaagatattgaccatccttgtcagctatacgataagtgctcttagcacccaaggccccctttctccacgctggtcagattttgttccacattatccatacttttttttttttttttgagatggagtttcactcttgttgcccaggctggaggctggagtgcagtggcacaatctcggctcatggcaacctccgcctcctggattcaagcgattttcctgcctcagcctcccaaatagctgggattacaggcgcccgccaccacattatcctaattttttgtatttttagcagatgcggtttcaccatgttggtcaggctggtctcaaactcctgacctcaggtcatcaacctgtctcggcctcccgaagtgctaggattacaggcgtgagccactgcgcccagcccatattatccgtacttaaactgctgactgtggcttgagtgcttccaccaatagaatccagttattctgttgattgaattaggtctcctattagtagaactgtcccccaaaatctataaataaaaagttcaggaagggcgcagtggctcacgcctataatcccagcactttgggaggccaaggtggatggatcacttgaggtcaggagttcgagaccagcctggccaacgtggtgaaaccctgtctctactaaaaatacaaaaattagccaggcatggtggcaggcacctgtaattccagctacttgggagtctgaggcaggagaattgcttgaacctgggaggcggaggttgtagtgaaccaagatcacgccactgcactccagcctgggtgacacagtcagactaaaaaagtagttatcattttggcagatggaatagctttctgtagactggttgagaagccatcatgccatgttgatgattgcccaaaagttagtaaatataagcaattgttctgtcatctagagatttctatcttgacagtagattattatacttgcccaataaagcctgtatgattataatgagtcaacactaagattcatttgaagagttgtacttatctgtccaaattcctgtcataaatacaaactatcccagcagtagatgattttgtagtgtatttggattacaagacccacactcttgagtgtagataaaagatttatcttagaagtagtagtcaggggccaagcatggtggctcacacctgtaatcctagcactttgggaagctaaggtgggaggatcgcttgaggtcaggagttcaagaccaacttaggcgacatagcaagaactcgtctctacaaaaataagaagaaaatttgccaggcatggtggcacctgcctctagtcccaactactcaggaggatgtggtgggaggattgcttgagcccatgaattagaagttacagtgagctgtgattactccactgcacttcagcctgggtaacagagcaagaccctgtctcaaaaaaagaaaaaaagaagtggtagtcagaaaataacataggcccatttttctgaaaaaaaaaattttttttttgagatagagtctggctctgttgcctaggctggagtgcagtggcgtgatctcagctcactgcagccttcaccttctgggttcaagtgattctctggcctctgtgtcttaagtagctgggattacaggcgtaggccaccatatctggctaattctgaattgtttctaaaaaggaaaaactcgggctgggcgctgtggcgcatgcctgtaatcccaggactttggtaggctgaggcgggtggattatttgaggccaggagttcaagaccagcctggccaacatggtgaaaccccatctctactaaaaatacaaaaattagccagggggtagtggtgagcgcctgtaatctcagctacttgggaggctgaagcaggagaatctcgagcctgggaagcagaggttgcggtcagccgaggtgacgccactgcgctccagtctgggtgacaaagtgagacctgcctcaaaaaaaataaataaacaggccaggcgcggtggctcatgcctgtaatctcagcactttgggaggccaaggcgggcggatcacgaggtcaggagatcgagaccatcctggctaacaaggtaaaaccctgtctctactgaaaatacagaaattagccaggcgtggtagcgggcgcctgtagtcccagctacgctggaggctaaggcaggagaatggcttgaacccaggaggcggagcttgcagtgagccgagatcgcgccactgcactccagcctgggcaacagagtgatgctccatctctaaaaaaaaaataataataataaataaataaacaaatataaaataaataaataaggaaaaaatcatgatacatctgtattattctttttatttatttttatttttatttttttagatcgagtctcactctgtcgaccaggctggagtgcagtggcgcgatctcggctcattgcaacctccgcctcccgagttcaagcgattcttctgcctcagcctcccgagtagctgggattacaggcgctcaccaccatgcctggctaatttttgtgtttttagtagagacggagtttcaccatgttggtcaggctggtccttaactcctgatctcgtgatccacacgcctcagcctcccaaagtgctgggattacaggcctgagccaaggtgcccggccttcttcttcttctttttttttcctttgagatggagtctcactctgtcgctaggctggagtgcagtggcacgatcttggctcactgcaacctccacctcctgggttcaagcaattctcctgcctcaccctcccaagtagctggaactatagttgcccgccaccacatccggctaatttttttgtttttagtagaaacagggtttcaccacgttggccacgctggtggcaaacttttttttttttcttttttaagatggaggcttgctctgtcacccaggctggagtgcaatggcgcgatcttggctcactgcaacctctgcctcctgggttccagcaattctcctgcctcagcctcctgagtagctgagattacaggcgcccgccaccacgcccggctaatttttgtatttttagtagagacagggtttcaccatgttgaccaggctggtctcaaactcctggcctcaggtgatccaccagcctcagtcttccaaagtgctgggattacaggcgtgagccaccgtgtccagcctgtattattcttttatgagagatatgtagatatatgaaaacataaattgtgaagaatatttattcagaaaaacaaccttcagaaaatcagcaatggctgattcaggacaaatttccaccaatctgtagtaaaaattaatgttcctggtgaagatcctagggccatatgcaatgccaggtatacgattaagtattataattaggccaggcatggtggctcatgcctgtaatcccagcactttgggaggccaaggcaggtgaatcacccgaggtcaggagttcgagaccagactgaccaacatggtgaaaccccgtctctactaaatatacaaaattagctaggtgtggtggtgtgcacctgtatttccagctacttgggaggctgagataggagaattgcttgaacctgggaggcagaggttacagtgacctgagatcgcaccactgcaccccagcctgggtaacagagtgagactccatctaaacaaacaaaccatatatatatatgctgaagcgagcagatcacttgaggtcaggagtttgagaccagcctggccaacatggtaaaaccccacctgtactaaaaataaaaaaattagctgggcgtttggcacatgctatagtcccagctgcttgggaggctgaggcaggagacttgcttgaacctgggaggcggaggttgcagtgagctgaattcacgccactgcattccactctgggtgacagagcaagaaaaaagaatacttgtacaacaatgagagtattcagttaatgagtgactcttgcccaattctgtaactttagagtaacaagcgttggaagaagagaagaatggatactggggagcaattggcaatctttatgacaatacaaaactaatgatgcataaaagttaaaatgaagtagacattaggtccactgacaattaggtaatgagtctaaatgaattggagcatcctgttttacttcattttcttttgttttgtcaaaggagtttatgatctattgggatgccctaagtatgtgttgtaggcagttctgggaagagtcttgtgagtaaagtgactcaggaaactctgaaaatgaggatattaggaattgatgacaacactggtgcacagaaaaaaaaaaacacaggaattttacaattaaaagtttttatttaaaaatctctcataacaacacattacttagtataatcaattataattcaggattttgatgacttgtacctgtgttatttcttttcttttctttttttttgagacggagtcttgctctgtcccaggctggagtgcagtggtgtgatctcagcttactgcaacgtccgcctcccaggttcaagcaattctcctacctcaccctcctcagtagctgggattataggcgcctaccaccacacctggctaatttttgtagttttaatagagacgggggtttcaccatgttggccaggctggtctcgaactcctgaccataaatgatctgcttgccttggcctcccaaaattctgggattacaggcatgagccaccacacctggcctgttatttcttttttctttctttcttttttttttttttttttgagacggagttttgctcttcttgcccaggttggagtgcagtggcgcgatctcagctcactgcaacctccgcctcctgggttcaagcaattctcctgcctcagccttccaagtagctgggattgcaggcacccaccaccatgcctggcttatttttgtatttttagtagagacggggtttcaccattttggtcaggctggtctcgaactcctacctcagatgatccacgcgcctcatcctcccaaagtgctgggattacaggcatgagccactgtgcctggcctgttatttctaaactgaacctttcattactttctttagccaaaaaacaggcctgctgcatgtacaggaggaagatagcaatgtttcagcctaagggtccaaccggagaaactaatatgcagagatggggctgtgagatggccctattgggttggaatcagaactagaagtcacacaaccttgaaccctatcagagcctcatcagctcagtttagggatagggcaggtatatcctccttggatattcactaacttgaaagttaaaagcagttttcctggttttcatgctggcagtctttatatgcaccaaatcttttctagccttcctggtgtacctatctttggagctgctcaccaccaaattctggaggtacacagctctaagctaatggtaggggcaggaaagacatgtggaaagaaataaatactcaagctgcccccacagagactgatctttcctgctgtgtcatcttccttgaggatggacaaacataacttttgtcccgagataatgtataatgtacactcttatcccttgactcccaccttgcctccccttcctacaataaccctccaagccattcaacccctactctcagtgagactctcactaactaccccccatctctttcttcccctactaggaaactgagcccaattaccaagtcctgattcgcatccttatctctcgatgtgagactgaccttctgagtatcagagctgagttcaggaagaaatttgggaagtccctctactcttctctccaggtgaaacttggctacttcttagcctggagcctcaggccttcactcctcacctccaccctcactccctgcacacagctgagcatattcttgccccatagaaaacccagtagttagccaggcacagtggctcacgcctgtaatcccagcactttgagaggctgaggtgggcggatcacgaggtcaggagttcaagaccaccctgaccaacatggtgaaaccccgtctctactaaaaatacaaaaattagccaggcatggtggcgtgcacctgtaatcccagctactcaggaggctgaggcaggagagtcgcttgaacccagaaggcagaggttgcagtgagccaagatcgtgccactgcactcccacctgggtgacagggcaagactccatcttaaaaaagaaaacccaggagtctttggttaatgtagtgcaggactctgagctcccgggaggacccttccctcccagatgaactgtgatggaccagcccaaaggaggggagagagcacttgggccatagtggtggtggatctttctaacactgaattcccttgtctgcaggatgcagtgaaaggggattgccagtcagccctcctggccttgtgcagggctgaagacatgtgagacttccctgccccaccccacatgacatccgaggatctgagatttccgtgtttggctgaacctgggagaccagctgggcctccaagtaggataacccctcactgagcaccacattctctagcttcttgttgaggctggaactgtttctttaaaatcccttaattttcccatctcaaaattatatctgtacctgggtcatccagctccttcttgggtgtggggaaatgagttttctttgatagtttctgcctcactcatccctcctgtaccctggccagaacatctcactgatactcgaattcttttggcaaa

SEQ ID NO: 52 - DNA, 95200 bp, Homo sapiens
  source 1..95200: mol_type = genomic DNA
atccagatttgcttttacattttcttgcctgagtctgaggtgaacagtgaacatatttacatttgatttaacagtgaaccttaattctttctggcttcacagtgaaacaagtttatgcaatcgatcaaatattttcatccctgaggttaacaattaccatcaaaatgttttgtggagactatgtgagtataatgcttatttctgtaaagcttttcactcttttgaaacttgatttataaaatttcatttgtgttttttgacgtttttaacagaaaatgttgttctaatttgtttttattcttactactttcttactattttatgcccattttttgaaagaaacatttatagaatatttaaattttatttctgggattattaaacattactatgataacaagatttttttaatgcaattatttgctatgcttctgaagcaaataaagaaaactgaagattaaagatttggatttgagcatacctaagaatccatttaattagtgggtcttcaatataactattaaacagagttaatattatgaaatcttaaatccatgctaattttgaaacaacgtattatcccacagaggcaagttactttcatatgtaatttgattcagaattctaactgaagttatcataagattttttatctcgatatttacttctatctataaaaaattaaaataattttgactattaattttattttaaatccatgctttctgtaaaagatagcttatttttgaataattttctgttgaatagaagcaatgtataacaagatttagtcttttttttggccttgtctgaatcattttagtccaactgctctaatagtcattcactttttaaaaagccaacatgaacattaagttgtctgaatatgctttatatgaaaaggtctccatttcacatggtcttgaaaattatatacaaatgtgaatttatgccttgtggtcttagaaattatatacaagtatatgtgtgttaatgatgattctttacaaatctatactataaaaaaactttcaggagactgaggcaagagaatggcgtgaacccgggaggcggagcttgcagtgagccgagatcgcgccactgcactccagcctgggcgacagagcgagactccatctcaaaaaacaaaaaacaactttctgggaacttttatgcaaaaaaattataacataattattttgttaaactttggcacacaaaacattgtttactcatacaaagtaatcaatgcaggaaaattttacttatatattgtgtttcttaagataaatactgaattaggacttaaaaggcagctattttccatcactgttagtttaacaatcttaatttcatcttaagatttcaagatctcattttgcagttgaaagttaccattattgttttattaattgtaaggtggttatatttcactacagagaaaaaaaggtatcaagtaattaggccagcatggtaaatgattaaatttgcaaatgcctattgttttctctctctgttcatttgagtatagttatttgggagtaattactattatattctatgcattgtgtggtctaatgttactatttatatgcccatttttcaaaagaaacatattttatagaatatttaaattatatttctgggattattaaacattaccaggctaacaagattttttttaaatgcaattatttgctatgcttctgaagcaaataaagaaaactgaagattaaagatttggatttgagcatacctaagaatccattttaagtacttttgattagctattttagagatgaatgttatgttttatgtataatctcagcaagcctggatggtaaaatggttttacataatcaatatcagtatagtttaaagtaattttctatcttaaggtatatgaccccagtggtcagaatttagtgctaaaaaggccaatatttgaggccaagcttatctctttaatcggatgttctcaagcaagagactggctcttctgttgacaagtaatttcttattttataatgtgggtagtaattgactgagttgtttgttaaagatatgtccctagatcctccttatttagcagtcctgatgcagtatatataacatctgaacttatacacttgatataaaagggttaccatttttgagaaccacagagataggtagttcattactctcaaagtatagaaaatttaaatatacttcaagcaagagacaagaatcatggaaaaatggttacatttctgtaggagataaacatacataatatgttaaaattattttctatatttctggagttaggcgggccccagtgattaaggtagtttaagtgtgcttgttacattaagaaggaaatttatctttggtgcactagtgtattttacttatgtgcttgactgtaagaccatctttcaaaagcaaggtttaattaagagattattgcaagcctgagttttgatatattagtcagatataaatcacatcataggaagatattattataatattataatagctctcttagaatggaggaaattttactatacagtgtacttgcccaagtcaggatctaaacccaggtatctctacatccctagagctcaaattctttttattaatatataatgtctctttagaatacacctgcctctttagaatacaattttcttgtaaaaattgttcgctgattttgtcctgttttgtcatcagctgatcccccttgttcatacagtagcatcttatttactatagattcatttcttagatgatacccttccttttgacctctaataggattagagttaactttaatcctattcccttttctacccttttgacaccttttcctacttctataatatttattgactgacagaaaatgttaatcatagcagtatgaaaagtaggatacatgttgatatcatatttcttacctaaaatagcattatgtattatacaaacatatagaaattattataataatttactgtctatatacatcatccataccttgtttaatttaatcttcacagcaaattgtcctataagaataccatttaacatgcaaaggtttgaagttcttttggaggtactagatattctacccaaatgttttatacatattatttttgtgtttgcaaacttctaggacagtattatcatcccctttttccagatgaaaatactaaggttcagaaaaattaaatacttttcccaggagttaaaagccagtaggtgacagatacagaggattctgtgtaactccaaaatcatttctaccacactgagagaaaaaaatgcctaggtatgattattttttgtgaccccaattaaatgagaaaaacttagcagcggtatctttacaaagatgctttgactcatgagtttgcctcagaatagctcaagagcacgaaagtcaggcaacagcatgttaggcagtgtctactatgggcaatgagacatacagcattttagcctaactagaataaaaataaatgcattggtttttagcagtggattacatgtagtgaaggaaaagcactccataaatcagaaatgaattcagggcatattacctaggagtgattgcagactgacaagacatctcatgggaggagaggctgttgataaggcaagattattttcaagactgtcttttcctatagaaagtaattcccaggacaaaaacttccatccaagaaatctgactttgattgtttatctgcagtatgacttactgagcaaatattattaaaaggttattcatacttcagattgcttttcactatcacaagactacattgtctgaactttacacactttgattcaacaaaagttttgaatcatgctgttatggcttcaacttttactgaaacttctgtagaactaataagagttggattggaaaaattaaatttaactttttccttgaactggcatgcatgcttgttgtaaatttttaaaaatataccattataacaaccatagattggttttaatctaggggctgggcaaacatcactgtagcgtagtggctaaagatacacttaaatctagcctttctgcataggatccatgtgactgagcactacttgctgaatctttctgcacctcaattttttttaacctgttaagtgtgataacagcacctatcttataagggtctcttgagaattgtttggcatataaagcaccaagaagagtatctggagcatagaagcatcccaaaaagatgagctattattcacagtaccagtgccaaagcttgaatccgactctgtctaattcaaaagccctggccttcagctgcccaatgcactgcttctagaggggaggttaagtttgtatccattactaatacaaatgcatatatatatatatatatgtatgtatatgtatatacaatacatacataagcatatatgtatgtgtatatatacaacagtcccaaattttataaagaaatttgagaaacaacaaaagtttcacaaggggaaatatattttctgttgtacttagcataatgtttatttataagtagattgtatcatgcaaaaaaatttcataaacccacttacttcaatttctggtaacttctcttctttattatggtaaaactcctcaaacttgtattacacccattatatacatttcttctccttcaattctctccgtatccattcattaggtttctttctcaaatgccctgcctgaactgctcttattaaagtaaacaatgaccttcatatggttaaatcccatgcctaattctctcctctcatcttgctagacatatgggtgttattagacacaatcgcctttgccagaagtattccagggccaaattcttgaaactcttctccttcctccttatagcctctcctttggtcataagatccaacataatggttttaattacattctatatacagactcttttctgaatttatgtctcaacccagaacctatgcatgaaccccagattcctgtaaccaagtgtctactcattgagtagaaactcatcctcttattagtacagaaaaaggaaagttaaaaaaaaattaagccttgctattatccttggctcaggttctctcataccttacattatcattgcctgccaacttctgcagtggcttcctacctggtgtccctggtcccacctccaggtactggtcagagagtaataaatatcattgtcataaaccctgacctcttgaaacatgtatttcattgacatataagattcatactcactctgcaattacacaaagtaatggaataggaggtaaaagtcagcaaagaggatattttgagaaagccatcttggtttgaaagttcttaatttataatagctagaaaaataagaagacttcaatttgtagaatcacttgcatttttccaagtgagaagttagaacacctctctagatatgttggtttctcttgaatggactagtttttgagattattataaaattatctgttattttgacattatgcttataccattaacattaatacagtgtgcccatttaaataagtattactttaaatctaaggcactcttgaaatttaaaaaaaaaaaagatgtttaactatatgttcttttttttatttttcctaattaatcaacttatttaacaaacagtaaaggaagaaagtcattagattatcacaaatggcaagcactaagaacgtacttctttccttaacccttaaggtgaagtcttcagaaattatgtttaagcaatatgaatcatagttagtttaatgagtcatttattcctgcaattaggtggagaggaaaagcagaaagaaaggagtcatttaaaggtcattatttaccaacttttcatttttcagtatagcctcacacacacccacatccgacccttatctaccttagagttcttctatcagtagaaattatttgtaatcagaagtagctcagcctgattcatcaaaaaggaagggattgcaataatttttaaaaggagatttcagagtttatgctgtcaatctcccagcatcagcttcttctaaatagtctccagctatttgtaatactttactcatagcttttggacatgcatttgttatcaaaggcagagtaaaacttgcttcctggggcctatttttccttgccagcatcacagtcttacaccacacagttatgaatatattcttcctcagttatacttttatttatgtcctctagacattctgggtaattatgctggaaggaaccagaaaaaaaaaaagactattacaagtatcatgtacaaaacataaaagtaaatccacacaagataatgtgttttatataccctgttatagatacagtgggaatcaacttcactcacagcaactttggattggcttttcatctttatttggtggcaatttgtaataataaagcaacagaatgtcttcatgtattttatcattctatctcttaattgaaacatttctgctattttatttttaaataagccagaatggaaggcattgtagtaatactttttcagttatgtaaaaagaaagcactttaaccacagcagatatagcattcttagtactgtgaattagtaatcgttttaaaatatgtaaatcatattgtattttattggtgggttattcttttgttgttgcccttagtacagtagtaaacttcttgaattattgttcaaccctttggagatattgaataaatgtacatattcttctaggcattcatttagttgccagtctgaaaatattgtttgaaaaggtaagtaagaaaacggtcaaagatgccgaaagagagaggcgtcagtacctggggacacatgcaccttctgtgtacctttcctcacctgtgggctgactgctgtgtgtttaatcaagagggcaactcacatatagaaaagtaaatattcacagtgaatacagtagtcccttcacagtagaaaagggttagattcatgaaccctcagtgaaaggtaattaattagtggttttgaaataagactttttcatgtaacaatggttacaactgaacctaatacaacttaacgaccagaagaaactcttcgagatctcactcccttctggttcttattttgtttcattctagatattgtgaatactagaatgactgtgggcggctatgcttggttttccttcaagatattcaatgacttctaatttcatgacttagtggacttggtcttttttttaaatatatgatccatatgtctctgagtgctacagagacagaaatggtttttataaaatgttattttagtcatttggcagagggaaatcagtatcaaataatacctcctctcagaatcactgggttacatataaactgtctgccaacaataacagagaaacaagtgagttagtccctttcaaatattaggcttctttctctctcctacaacatgcaagagttcagctttataatctaggttcatttcctttttgttctttctcaatgctttttgcatattgagaaagttttcaaacaaaaattcatgtaatctagaatcagttgtagaaatttttaagataggtgcactaaactcagaaaactagtcaaatggtgtattgtaattaaaggcatcagattaacttttcttacatttagtcatgtttttaatctagattttttaagtctgatttagagagacatgtagacaggttgaattttcaaaaatacttagctttattggcaatgtagcttattcttctctcatctgattttgatttacaagaacattctttccttagagtgggatataaaacagattcatcatgaaattgtacttccctgtaaggctttctgtcacctcactatgacaatgtgtgaggcaggacatttccatatggttaagatgattgtcacccatctttctattcacaaactttttccctccttaagcctctcatacaggttccttcatctttagctctaagttctctgcttctctctcttgtatggggtgctcttcaaagtgaagacaaaaacaactgggatctgtttcctgctacaactcattattattctcatgtttgaacctctatcttaattcgcagttgtaattcttgtgaaattattttgtcaaactatacggtttgaagctaaattcaaaccaatgtggcaatttctgatttaaaagtttgccatatttagttttatgagactagatatgcacctaaaaatactatgtttaaactttttgttttgggaacatttcagatttacaagaaaaagttgtcaaaataattcataatttgaattacccttcccccagctttccctaatgtttacattttatataaccatattgaaattatcaaaacaggatattaaaataagcacagtgcaactaactaaaccacagatattgtttagattataccagtatttctgctaatcctttggtttcctgcttgatatggtttggatctgtgtccccaccaaatctcatgtagaactgtaattcccggtattgaaggtggggcctggtgggaggtgattggatagtgggggctgtttctcatgaatggtttagtactattcccttggtgctgttctcatgagagtgagttcttgcaagatctggttgcttaaaagtgtgtagcacctcccacttggctctctcattttccttcactggctgtatgatgtgctggctgcccctttgccctcctccatgattgtaagtttcctgaggcctcccaagaagctgagcccatgccaggatcatgcttcctgttcctgtggaactgtgggtcaattagacctcttttctttataaattacccagcctcagatatttctttatagcaatgtgagaatgaactaatacactgctcccaggagctagtggccattgggaacacttttaggcttaatcttacttttgacatttctttcttttctcttttctttgtgttttttttgggggggaaggggacggggggaagcttttccttacttacagctacaagatgcattaatctaatcttgtattttttcttattccagccctagaattaaccacttctccaaaacgccctgattccttccattgaagaccgatatttaaaaccaagatctggatactagttatactcattgctactggggtatcactgtttatatgccctcttaagagtacagagcaaaaaatatgtgtgtatactaacccatttatctgcacacatctatatttacttttgtacatgtgtatgcatatatgtttgcatgtatgcatgtctccatctaccttcctacttatcgatttctctgtctctatccatacatctatctaccatctatcttcatactaatacctccaatctaatcaacaacaccgttctaaccttcaccattatttgttacttctttctcagacagtgaaaactaagactatcaatatctgaaacctgtttgcttatttgtttaaccctaccatacatgtagtttaaaacttgctaagccattactctgtgagaaacaactttaccaagaggagtacattgtttggattatttttatttttagctttacagttcagtcaaaacactattttctaaagttacttagggcacatcccctctctccactgagcttattgtggttatgagatttatttgttatataaatagataaatttgctacaaactgcattttctgttgggttttccatacatctttgttgattttgttaaacttacatttaacaaaatgtgctttttgtggtatacaattttatgatttaagtcatgtatccaatgccacatttccttatagaagacttccattatccaaaaattccaccacactgcctgcctgtagtcagctaccgaccccaaactccaaactctggcaaatattgcactgtttgctgctgctatagtttcaccttctccagaatgtcatgggaacagagtcataaactattgaaccttttggacatggcttcctccgcttagtagaaacatttaaccctaattcatattgtattaatcattagttctgccattttattgctgagtcactgtctcttgtatggatgtaccacaatttgtttatctgttcacagtttgaatggataaactgtgaatggatgaactgtgggttgtttcaggatttagtgattataaataaagctgctctaaacatatcaagttaaagtttttgagtgcagttatgtttccatttcttttgcgtaaacacttagaagcaagattgctaggtcatatggtaacagtacgtttagctttagaaaaaactggcaaactgttttcccaaagtgactatacaattttgcattctcaccagcaatatattacagtagaatatcattgtagttttactttgaatttctttatgggtaatgatattgatcatatcttcatgtgctcatttactataccgtcattgtgaatgtgtttgtttaaaatacttccctatttttatatcattttctttgtttatttatattgtcctatacatattctggattaaacgttttatgaaaatgtaacttacacacctttcctttctttctgtggattgtcttttcagtcctttaacagtgcttttcaccaagcaaaagttttcagttttgacaaagtctaatttattttttcattatggatcatatttttgttgtcatttctaaaaattctttcacttacccaagtcatgtagattttttcttatatttttcttctagaagttttatagacttacatttctattaaggtctatgacaaattttgaatcaatttttgtataaggcatgaagtataggtcaagcttatttttttatatgaatctccaatttttatagtaccatttcttgggaaaactgttttttctctatcaaattgttttcactactttgtcaaaagttacttgtctgcatttatgtgagtctagattctttattctgtccaatcgagctatacttcaatattgttacctaatagcagagtttcattagtactacgacttaataataataattcttaaaatcagttagcattactcctacaattttggagtttcttttcaaaattgtttcagctattctaggtattctgcatttccacaaatatttttgaataaaattgtcaacatcgacacaaaattctgccaggatttcgactgggattttgttgaaaatgtaggccaatttaaggagacttggcatcttaacaatattaagttttctagccatgaaaatggtacatatctttatttatttatctttttaaataactgtcagaagtattctgtttcttctattccaatatgtataatgcttatttcttttaattttcttattgcattgcctaagatttttcggtatggtattgaagtaatggaaaataacattcttgctttcttcctagtctagagcagactggggcgctggaaagggaggtgaagcattcaatatttcacctttaattttagatgtagggtttttgtagatgtcttttaccaaattaatgaagttgctttgtcttttaaatttgcttagtttttaacatgaatagatgctatacttgtcaagtgttttttctgcatcatgttttgatggccatataagttttatttcttaaattgttaataaggtgaattaaacagattgatttttgaatgttgtgccagtcctgcattattgggataaacacaactaagttgtactacatcctcctttttatatattagtacattgaattttcttgtattatgttgggcatatttgcatttatgttcataagggttactatcctacaattttcttttcttgtaatgttgatttggttttggtattagtataatctagattcataaaatgagtcagaaagtgttctcttctattttctagaaaaaaatttggtagaattgatattatttcttccttaaatggttggcagaaatatccagtaaaaccatgtaagctggagattttcttgctgaaaggtttctaaatacaaattcaattttctcaatagatatgaggcaatttaagttaactgcttttcttgaatgagtttgggtaattttagtctgtcaagaaatttaaattgaatatatatgggcattgaatcattcatagcattccttttggtaggaatgttgtcatctatttttatgtttatagtttgtatcttagtttttctttgtaaattggctacagttctatcaatttcattgttgtccaaataataactttacttcattttatttatttttctctttttaattttattgattttactcttgtctttattacctcctacctcctgcttgcattgcatgtaaatttctattatttctctaatttcttgtggtgaaaacttaaattttatttcgttctaatatatttatatttaatgttataaatttacctttaggcactgaaacatatgagtattaaaagtggcagacttgtgtgataaatgtagatgagtgaatttgtttcttctcttgttttgatcagcaaaggtccatgtggtcttgaaagcttttgggatctgtagatttgggcacttttttttttaacttttattttgagttcaggagtacatgtgcaggtttgttatacaggtaaactcgtgtcatgggagttcattgtacagattactttgtgactcaggtattaagcctattacccctgagttatttttcctgactctctccattctcccacccacctccctccagtatgccccagtttctgttgttcccttctatatgtccatgtgttctcattatttagctcccacttataaatgagaacatgtgatatttgtttttctcttcctgtggtagtttgctaagcataatggcctccagctccatccatgtttctgcaaagcacacaatttcattcttctttatggctgtgtagtattccatgttgtatatgtgccacattttctttatccagtctaccattgataagcatttagattgattccatgtctttgctattgtgaatagtgctatagtgaacataaacatgcatttgtctttatggtaaaatggtttatattcctttgggtatatacccagtagtgagattgctgggtcaaataatagttctgttttcagctccttcaggaatcaccacattgttttccacaatggttgaactaatttacactcccaccaacagtatataagcattcctttttctctataagctcaacagcatttgttattttttgactttttattaacagccattctgattggtgtgagatgatatcttattgtggttttcatttgcatttgtctaataatcagtgataagctttttttcatatgcttcttagccacatatatgtcttctttttaaaagtatctgttcatgtcctttgcccactttttggagtgtttcacacatactccaaacatggagttgtttgttttttctttgtagatatgtttaagttgcttataaatgctggatgtttgacctttgtcagctgcatagtttgcaaaagtttctcccattctgtaggttgtttactatgttgacagcttcttttgttgtaatttattagatcccatttgtcaatttttgcctttgttgcaattgttgttggtatctttgtcatgaaatctttgtccattcctattacttgggtacttttcaatgcaaacaattttaggtcaacaataagtataaacaattttggctcaatgatattttaaaaacatttattatgaatttctatagtataatgtgtgggaaatggataaaatgtggattgtggacctgtaaaaatcttaaagttttaattttacaactcaattaagctaggcatttctaattttatatcagtgtgattcttgaaaacaatatagtgttccatggaactcttggaagaaaaaccaaaacctgtgtgatattccagacaggtgctaaagaagagaaatagaatgaatgataattactattaattgaaatacatatctcattaatcttcatagtaactgaaacttgcaaaacgtctacaacttttactttacaaggtgtgaagtaggggagttaaaataatttaccactttgtacagcaaggaacaaagatgatttaaaatcaagtctgctttactgccttactttagtgagatatctatgtctgttatcacaagggaaatggaaaggaggttgtaacattttctggctgtgctttattttttacaatgtccagagaaagtaattatcagatgttttctggttacatgatacatgatttttgctccagtttgtcacttacttgatagatgtatgcttctttttatgcccttctcttcccaatcagaaaaaagaaagttaaatcatataggataaaatgcattacatataaaagttcctgatatttttagatgtgtttcccatgagatgcctcaaagatggaggcatttaaattagtggcaaaaagtatggagggcctcatggagttcttaggaatactatcccccacattgcaggttagttgagagcctcttcaaaagaccaacgtatcctgtaaaattatcacattagaattccttttatatggattccattggcagtaatataagcagaccaataaaaaagaaaaaaatatggatttacttgattacaaaactgttaaataattctttgaggataaaatagatttagaccaagaatgtcaataaaagggggcaacagagtaaaggaaacaaagagtttcagtggagaataggagcaatttaagtgtttagagattttttagtgaatatctctctgacattgctaatttcactttccaattatataaagtgatgagaaattgttgtatttatcctttacctaaaatatatttttgaacaactctgaaatgtttttatcagatagtttaattaattaaactaaggataattactggtggcaaaaaccatatgcctttatttcattcttaaattgttcatttaaactcactaggactagttttccataggtcctatattagtaagtttaggctactataacaaaataccatagactgggtggctgaaataacagaaatttatttatcacagttctggaggctggaaagtccaagatcaaagtgtcagcaaattcggtgtctgcggagggccctcttcctggcttgcagatggccactttcttgctgtgtctttacacaggggacagagactcaaatttttctcataaagatactaatcccatcataggatccccattctcatgacctcatctacatttaatttcccaaaggcctcatctccaaataccattatattggggggtagggcttgaacatattaattttgggggacatgaacatccagtccatttaagtaccattacttttctgttactcttaggcaattaaatattcataagttacttgcactcacaaaaatttatagaaatttaaaatgtctaatcttgtgtcaaggtaaaaatcattcccctttttagaccatatagggtaacttcttgatgttgccatggcatttgtaaactgtgatggcactggtgagagtgtcttttaacatgttaatgtattataactagagtataatgagcagtgaggacgaccaggggtcactctcattgccatcttaattttggtgggttttagccggcttctttactgcaaccccttgtattagcaaggtctttatgacctatatcttgtgctgacctcctatctcatcctgtgacttagaatgcctaactgtctgggaatgcaggccagtaggtctcagccttattttacccaacccctactcaagatggagttgctctttttgaaacacttctgacatttggtgtcatttagctggtattatagtcatttagcactgatacactatggccttcaaagatgtttctttgggaccattataggtttttaggatatttctcatggcaaacaatcttctcttgccatcttcttatcaatctgctccctcttagagttcctgtcattccttctaaaggagaatttggagccagatccctttaaaatggtttatgccaactcctcctactttgtagcacttatgtagtctgtggcaaagtctcacatcttatgtcccaataaactctgggagcgcaacaaattattggaattcagatatccgttgtgaagccaccctctcacttaaaatagctatgtagccacgcaatctgagctttagacatttctcaatgtgcacctaaggtgttccccaaatatggtacacatttcaagttctctgggtggtctcctttatgctgacatcaccacccttcacctcattccccatggcaggacaaggaggtctcagagaacactatcacctctacccaaataaatcccctttataacctcatctaggttggtaagtggctatgaataacaacactgatttttagaattttctttgcaaacctggtctagggaatctgttcttcactttggaatgtgaatgctcttggcagctattattttcccatcaggttacagcctcagtgaaaactgaattataaagggaccaattttaaaatcttgttatggtgctacatgaactctttgatgtttcccacattttttttctgctatgtacccatcagatgagaatttctaccaaccctcactttccagaaagaagatcaatgtatgtttggtgcagagcaacccataactgatttctgttcaacataccatatttattcagcaaaaattttcagtttaatataaaacacagtatgaattttaatggattttagtctcctaggcatatgtgctcaagtttttttaaattatcaaaattctcttactccttctatctttgtagctattacattttttaaatgaagaaaatcgatatcaaatactccaaatgcaatttatatcagaaaattgatttggacttaagtacatgttaggaaaatattaggtacattaccaataattcaaagtataaaataaatcaccaagttagtattattttttaaaataaaatgataaaatttcattccctctttaggcaagtgactttaccatttcctgaatctgtcattgagtggtttggcaaagagctgacagatgaatctgaagatctttttaaaaaataactgcagactccttaccatataatttcatgataatcaatatttgctgaatcatctttttcttacctatataaaatcataacaaaatatacattcaatgtctttataaaactaggtactcctgagaaattaaaaattacctttaaatatattttaaaagcattttagctatagtcagctaagctatctaagttatctcacttagtttacactccttactataatgcatcaataaacttcatgttaggccgggcacggtggctcacgccagtaatcccagcacttcgggaggccgagacgggcagatcacgaggtcaggagatcgagaccatcctggcgaagacggtgaaaccccgtctctactaaaaatacaaaagaattagccagacgtggtggcgggtgcctgtaatctcagctactcaagaggctgaggcaggagaatggcatgaacccggaagttggagcttgcagtgagccgggatagttagccactgcactccagcctgggcgacagagcgagactccttctcaaaaaataataataattttaaaaaataaaaataaataaactccatgttagaagtagaaacctgttaaccaactgatagaaaaccaatcaagataaaatgtgctccttttgtctccttcatcccctggtttagttatagctagatgtatagttaatgttcataaagaaaactagtaatgaaatgccttccacccatattaacgatgctacaacatttttatttgtgttaattcttttttttttttttttgagattggtacatcttatttcattgactagaatagaaatgctgtgtagggcattcatttaaaatagtttaaggtaaaaattaccctaaacaaactggctgttatttctaactctgtaatatatattatttgtctatcaaggttaatttcaaaattctaaaacttttgtttccattgaaattctttcatatagaagtctagaagttctttagtatatagttaaacaacttatttatggattgcccaggccaggttttgtctagctgcaaactggctttactttaaaatcacatactcttgcttaagtaagtattaaggaaaggaagaaagaaaaaaacaacaaaaccaaccagagccatgcattattttaaaggtaaaaatctgctgggaatagaatttcgtgatactttcaatgatagtctatcagtgtacaaaaaggaggaaagtaaaaggtaatctaaaggaccattctttttctcattaacatctcaagaacatacagttctctagataataatatcactggtctctgctactgaaagctaaagaacttttaatctccaggaatctgtttctgtttgtgaaatagatgactgtgctttgtgagtgctgattactaacctatctaaaaacatcaaatgagattaaagttgctgaaattttagaatcaccattcatctaaggtttgtaataccattttgtagaaattgttctaataaatctacagaattcagtccttcacacattaaatgtcagcataatctctgttttaagtgtgagattcaggagtgcatgcattccttgagggtgagcaaacacttagatcctatgttaaatttgctttatgtttaacccttcaaaaatcttaaattactatatgttttatcctttctagattaatttatgtgtactaggccttttaaccactttatgtgacatgaaaaacataaaataagccttaatttttcaaaatgtgagaataataatcaaaaaaagagtagaaaagcataaaattgacagggaagatacactataaaagcagtagtttaaatccataacactttacagaggacacaacattcaaggcacctattccaggctgccaattagtaagccactggccttgtataaatactgtcattttttcatatataatatagaaataggaacacttaccttgcctgatacactcgtgttaatatcaaataagataaagaatatggaggtgctatttaaactgcacagtagctattcaaatagtataatgcctccttcatctctagaatgtcatgctttgcaaaatatacttatcactattttatttggggcacagatatgttcactgaatttaaatattatttcagttctttttaaataatatagtactgatcaataaaaagcatgtaatgacatcttattattaattaaactatttacaaggagggctgagtagtattttcagatctgctccttgacatttatcttcaagataagcacaatagacttcaagaaatatcctattagtggtatattatgaaaaagaaaagccaggctgtgggcagtggctcacatctgtactcctagcacactctgggaggccaaggcaggcggatcacttgaggccagcagttcaacaccagcctggccaacatggagaaaccccatctctactaaaaacacacaaaaattagccgggcgtggtggcattcacttgtagtcccggctactcaggaggctgaggcaggagaattccttaaacctgggaggcagaggctgcagtgagccgagatcgtaccactgcactccagagcctctgcagcagagcaagactctgtctggggtggcgggctggggggaaggcaacaacaaaagaaaagccagattacaaaaaaaaatatgtaaatgtgacttcattatttcatttagaaacaaacaccttatgactatatgtaaagatgtgaaaagtacaagaagagcacttggcggactattttctcttttggttgctattaaaatatttaacgataatttgtagacaatgagatcataaatgatttttcttaactttttatgtcagagttttttcataaccaaatttaatacattaattatatattaattttctaatgactaaaaaatattcccatctgtatttctccttcatatggaagactagtctagcaatcaagagcatagcctttggaatcagacagattggggtttcaatataggctccatacttcactagccatatgacctagcaacagaaatgaatctccctgccggcatggtggctcatgcctgtaatcccagcattttgcaaggccagggtgggcggatcatttgaagtcaggagttcaagaccagcctgaccagcatgatgaaatcctgtctctactaaaaatacaaaaaaattagccaggtgtggtggcacgtgcttgtagtcccagcaagtcaggagtctgaagcaggagaatcgctttaatttgggaggcaaaggttgcagtgagccaagatcatgccactgtactccagcctgggtgacagagggagactccatcggaaaaaaaaaagaaagaaaaaaaagaaagaaatcagtctctctgaatctgtttcttcaactttagtaataggaccaatcccatttgtttgtatatttgatggcttaatgcctgagagttaaatatgctgtcttagttcattgtgtgctgctataacacaatatttaaaactgtgtaatttataaagagcaggaatttatgttctcacggttctggaggctggaaagtccaagatcaaggtgctctcacttggtctggtgagagcccagtctctgctttcatctcacttggtctggtgagagcccagtctctgctttcatctcacttggtctggtgagagcccagtctctgctttcatctcacttggtctggtgagagcccagtctctgctttcatctcacttggtctggtgagagcccagtctctgctttcatctcacttggtctggtgagagtccagtctgcttccacaatggtgccttgaactttgtgtcctctctaaaggaaaagtgctgtgttctcaagtaacagaaggtggaggaactcctttcatcaagcccttgtataaaagtacataatcccatttattaggacagagctgtcatggcctcatcacctcccagaggctccaccttctgatcccatcaacttgataattaggttttattatagatattggaaaagacaccacattcaaaccatagtacagggtaatataaattatttagcactattcttgatatataattgaaaactcagtgtgttgactatgatttttgaacacttattcatggtgttgaattacttcttttcttccctttgcttttttacatttattcagctttcatttggttggaattactctttaatattatgcttggaaaagttatgtaggtggcattttaccttttgcctttcctttaaattatagttttgctggttttaaagcttttcagtttataacctttctctctggattctggaagggctgatcaattggcttcttgtatttaattttgcagaagagaatgctaagggcaatttggttatttcttttgtaaataacctaaataggtctaaatattatgtttcaaatgttaatcttgttttttccattaatattatccaacattaggtaatctcttttcatttaaggacttgattctttcattacctacatttgtttatgttttatttattcttgttttttctttcattgctctgctatcttccagatgtgtgtctatacatatattttatttatttattttttagacagagtcttgctctgttgcccaggctggagtgcagtggtgcagtcttggctcactgccacctccacctcccaggttcaagcaattctcccgactcagcctcaggaaataaagattaacaattatcttactcatttgaaactctatgttttcatgtcatttgactaattagtttaaggaacatgcagccagcacatgtatagtgtcccctcttgtttttttagcaatttttaaaacttttattttaagtacaatgacataactgcagggtttgttacaaaggtaaacttgtgtcatggaagtctattgtacctaatagttgtttttcctgatcatatccctcctcccaaaatccaccctctgaaaggatccaatgtgtgctgttctccctctatgtgtccatgtgttctcatcatttagcttccacttgtaagtaagaacatgcaatatttggttttctgttcctgtgttaatttgctaaggataatggcctcaagctccaaccatgtgcctgccgaagacacgatctcatttatttttatggctgcatagtattccacggtgtgtatgtaccacattttctattttttgttattttcttttattttttttgagacagggtcttactttgtagactaggctggagtgcagtgatacaatctcagctcaccacaacctctgcctccagggctcaaaaatcctcccatctcagcctcccaagtagctgggaccacaagcatataccaccatgcccagctaattttgtatggagatacggttttgccatgttgcctgctcaggctggtctggaactcctgggctgaagcaatctacctgcctcagattcccagagtgctgggatttcagacatgagtcactgtgcccagcctctgtaccttgttttatttatctagtctatcactggtgggcatttaggctgattccatcttgatgctgaataaccctatcatggggaaaaccctgataccttcactcccccaaaataccaccaactaaaatctattccaactcacctctattgaaagttcatgacaacagatgggtttacacaggggttgtgcaaataacttgaaatcaaatattagacattctgttcttaataaatttcagcaacccagacaatgggaatttctttttgggtgtctttcttactgcctttccatccctccctacaatacacacgcacacacacacacacacacacacacacacacacacacacactcccctctttctttttgaactgacgtaaaaataagagctcatccttttagaattttgtttttacttgtagggtcctttgaaaatggaaacgtttttgttcacataagtgaaaaaaaagtcttaatagtatatgttattttattttacacaaattacagctataatggaaagggcactaaccgtgaagttaaatttggatttgaatgttggcttcatgagtcaatacctgtgtggctttaaacaacttactcagcctcatagtcttctcgtgtgtgaaataagattatcagtctcacaagactgctgaggtgattaccaaggaaacgcaggtgaagatgcctagagcatagcctgcttatgtgaataatgaatttttaaaaccactgggtaaataaaagatgtcactgtggtacatggatttttttatactttataaacattctctgagctcgcattacgtctaaggcactgccctagatgctttgaaaagcaagaaaaggaaggtacctgccctccggaagtttaaaatttagagataaagacaaatgcaaaaaaaatggaatgccatgtgtaatagagatgcaaagtgaataatagtaatacttggtaaaatctgtaaagacttcacataatatagttggagcatgaactaggtctcaaattttgagtgggatacaatccatatagacaaaacacgtgcagaaaaaaaaaatcttactttttgaatctaagaaatcactattaaacggtctattggcaagcatgagtaaaacccaaagactgaggctacagatatgaccagcttggagactttagacaaaatattccatttgtcttcttctgaatctatgcctctttgtgtaaattatatgtgcagtattcctctgagccaattttgttttgcatgagccagtaatgggccagtgaacatttatttcaagaaaaacagaagtatggtgtttattatagcatcctctgtagccagaataactaaataaaagaatgagtatctccagagatctcccccaccccccaaaaaataactagaagtttcagtaagctactgaatcagagaggcaaaaaggcactattttaatttttcatattttatttattattgtagaagaaatccaattaatatgcaatttgtttcaataactgagaaaaacatcccattatggaataaaggtagtattataaactggtgtcgtttttcatacaggatgactaccaaccagaactcagtaaggcaaatatttttccagaagtagggatgtgtttgagccaaatccactctcattttttaaatccatgttctttgtgacctaacagtgaagtttgattcattgaagccactaagtgatgaaacactatgaaatttactagcaattatttctccatttaattttatgaatttcctccagtttcactaatatcatcagcaaatttttcacacagacacacacacacactatgtggtgttattaacagctttattaatctgtatctcattagtcttagccttggctaattgtaaacatcaaatccatcataaaataataagtactcagccaggcacatgtggtcccagctacttaggaggctgaggtgggaagatcacttgagcctggttggttgaggatgcagtgagccatgattgcaccactgcactccagcctgggcaacagaaaaaaatcctgtctcaaaaatactaagaagaagaagaggtattcaaatatctctgaaagcaattctgaaatacttaccccaaagtgatatttgaacaactggaaaaagtgtgtgttctccaaaataactccttttaaaaatacaaccttaagattaaatacataaatatatgctgtatttgtctaatttttggcaggaacacatcacatcacttcatggtttcttataacactctttgcattaccagctgcatataccaactctttgtgaatagggactgaatcttccatgtgtagctctgccattgtacggtaagtcctcacctgatgtcatggataggttcttggaatctgcacctttaaggaaaacaatgtataacaaaatcaattttacccataggctagttgatatacgtaagagttatgttcctacatctctcatcacaaaaacatcaccgaagttctaaatagaccaaagacttccaatattaaaattgaaataaatgtgagctatacatacattgaagaaagattagtaaaaacaagataagtgtttaccaacttattccacttcagggttacaggtggcctcagagcctatcccagcagctcaggcacaaggtggcaactgaccttggccaggatgcctgtccaccacagggtgcactcatacaatactcactcactcactcactcactcactcactcactccctccctccctcacactgggaccatggggacaagcagatgaacctaatgcgcacatcaatggaatgtgggagaatacaggagtacttggagaaaacccacacagacataaagagaacatgcaaactccacacagtatcactgccggagattcttttttttttttttcctcatcaatttataaccaaacaatgttgatcaaaatgacgtaactagaggaccttctgtgtataaggattgaggactattgtaaaactctaaagaaacaagggggaaaaaaatgggcccttggcctaattagcatgggacagcaaagaaatgagctttcaaaagattaaatataaacataagcatttcctctttcagctgaaatgagtatggtgaatattgtgtaatgatcagtgtcacagcagtcccagccatgtcccaaccatgtattttctatttcagggaggaagctattgtaactctgcagggtctcactcactttgatttatgctgtgctctcagctcctgaaaaattctttagaacaacctgagaagtgactgtaatctgattgttctctgggagcagtagggattctatgatggcactagtagtgttctgtttttttctaatgagttctagtaatgaatggggagttggtacccaaactattgagaatctggctggtattttgctcaaaaagggtgtactctccttagaaaatatactctgtactctagaggatttctccttcagagccatttcatgatggggaagcagacttttagagatttgctttttaaaaatatgtgtgtatatatattttttaaccaagaagaaaacaattctgcaaacattgctgaaatgtgtaaagacaccttcatggtatatcctattttttacttggagaaagaaataatatcaagaagcaaaagttattattcatgtttttctgcatttttattaataaattttgtaactaattctaaagtatctggctaacagagaacaatatttgtgcatttaatcaaatgcacaaatatttgattatttaatcaaagatgacaaaaactcaactagctgaaaatatttcatatctatgcttgtttttatatttactcattatctacatgatttttatttagtgtgccttgatatatatttttcttcaacaatgtgtaagattctatctcataagtcttgttctcttcttagttctaagcatttactactatttagatttgtgatgaggaaatgaggctgaaaatgatatgacacagtgaaaaaggaactaatagtgtcagcccataaaactatctcaggaaatgaggtggaacctcatagagataacctcgttaagaggagtcagaaaaatgtacattgcacatccacataattggaaataggctgtgataggaaactaggaattaccaaaatgattgcagatgtccttgactcataaggctgattttcatttagcacaccttctcatatacaggtggagcaaagcaatcaattgtcatagaatcacagaatttttaattttcaattgagttctgagttcttccaaagcagccaccgtacaatgggaccatgtttatgctacatggtttataggtacctgcatttaatagcttagactgagctttgcagttcagctgtatatgtttcaaaaagtttagaaccatattaatatgtatgtctttggttaatatatgaaatattttgaaatattgttatacgctgcaaacaattgattagttacaagcccagccaaagtgctaggccttgaactttgagaaatagaaagtactacacaaagcatgatttctaattatggggtgcatgaaatttggttgtgtcccccaaacaaattatttcagtggtaagatagtgctggaaaataagtatatacataccaaattaactggtacaagaaattagggaaagaatttaagttttttggctcagtaccagataaatttggattcaagcttcttctttgccactaagttgctgtattgccacagtaagttccttacctttgctgtgtctcacttttttcatttacaaaacggggaataatatagctataatagcataggatagctttaaggatgaaatacaataccgagaaatacagttttgcaatacttggcactctgtaaatggcagctatttacagcaactcatgaaagattatttataagtttggtgacttaatggagatggggttttactggaacattgaaatatattatgaatttcataaatgtgaaactcataggaaaaaagtcaaaataggaagcctcgaacctagaaatagtaccagatgtgaaaacttgttaaataatttttatttaaagctggtttccaagaaatataaaatttccaagcaatgtttttccacctgttgcaatctagtcaagtgtaaaattttcacctcaagtaaaacatcactcataagcacatcttgggggaaaaatacttgttagcaaaattcatttaagaaaatattaacacttcaggaacaaaaaagcctgggtaaataactggttataagacttaactttattaatatatttctataaatttattggaatattgttggacaattgtggtcattatggtaatggtacagaatgtacatgtaataaattttgatgacatcgcaatgttaataaaatacctaacaacgttgacagggagaagagggaaattaggaagcaatgtgggaggttcaatatcctcatcttttacataatgtttgtatttgaatccatctaaaattgaaaaattgtttataagatataatgacttaatgttaatgtttttatttcttctcttaacctgaaagtgacactttaaaatgtcaatacttacagtgcttaaagtggatttgttaaaaatcagtacattttttcaacatcacttcattaattttttttcatttaatctaagtagtatttatcccaaattgcatttagtaaaagatatttcttgcttcatatccagatctaggacacagctactttggcccataaggaaaaattcatttggccgtctgcttaagtttttggcacttcattcaatatatttctgttactttaatataaaagtttttaaaaagcaattctatcttttaaaaatatttattctcctaatcatgttttcatttgatgtttataatttttaattctgagtagtgagactgagggtttctaaaaattatctgtagttttcttcattgtttacattctttgagtaaacatatgtcttttatactcaccaaaaaacacacacacacacattctaacaaggcatgaactgttttctatttttcacttgaagattagtcatttttcttcaaattccatggaattttgttagacttttatgatacaatgtatcatcttcttccttgaatccattgtgtatacgtatttaatttacaatagtaaaattatattacacatgttagccgtttattttaactttcttcaaaaagtaacatgacatttagttatttgaatctaggaaagttaaattctataaaattacaataagtgtaggctacaattttaatcaaaatgcacataatttttaaagtgaatagtttaattatcatttaataatatcaaagttaatctcaaaaatttgattaaaaacacattatcaaataattaaatgcttagagctaaaaattgagaacatttggtgcttattcaacaaaattccaagtttcattgttttagaatattaaaaatcgtgttttcatgtgttatagtatacaccaaaaatacttatttcccatatactctcaatttttttcattgaacatgttcttttcacagggaaacattccctttagtttttcagcttttttgtttgtttggttttgttgtttggttttgttttttgttttgtttttgtttttctgagacggagtctcactctgtctcccaggcgggagtgcagtggtgcagtctccactcacggcaacctccacctcctgggttcaagcaattctctgtctcagcctcccgagtagctgggattacaggcgcccaccaccacgcccggctacttttggtatttttcgtacagatggcgtttcaccatcctggccaggcatttcgtgaactcctgatcttgtgatccacccacctcgcctcccaaagtgctgggattactggcgtgagccaccgcccccggccagtttttcagctttttactcctccattttgaccttccgtgaatgagactcactctctcaaatccatatccattgaagtctcttcagatcagtggtgtcttaatattgtttctaaacctcctaatctcattagaaatataagggtaataagaggatggagaggaagtttccgactgagatcaggtggttagaaaatagttacctcttcctggattgtctagaaagtaatttacgttgaaactcgcacatacattttaagcccaatataatactctgtactatagaactaaattccacttgcgtgaattacaactactgagagagaatacctagaaccgaattcaatatatcatattgtattaggccgttcttacattgctttaaagaaatacctgagactgagtaatttataaggaaaagaggtttaattggctcacagttctgcaggctgtacaagcatggtgctggcatctcttggcttttggggaagcctcaggaagcatttattcacagcagaaggtgaagcaggaggttgcccgtcacatggcgaaaacaggagcaagagagatgactggcgggcaggttgtcacacacttttaaactactaaatctcgtgagaactcactcactattgtgaggacagcatcaagccatgaggtatccacccctatgaccccaacgcctcccattaggccccacctccaacactggagcccacatttcaacaggagatttggaggggacacatattcaaatcatatcacatatttagcgtcatttcaagttaattttgtgaaggaatttgtgtaatcaaaatcctgccagtctattgaaaactttgaaaagtcgaagtcagaaattatttcaaatcgaatacactactattaataaaattacactgcacaaaatctatggttttgagagcttatagcctagaagaagcaggaaaccacgtaggtttttgtgggggtctacacataagattgcctcaaataccctgagcatgcaatgtggagtccaaagccttcccagatttcttcaaactcctagcatgttatgctgccttgattctttcccccatgtgagctctatagctgtgcgttgttgaagaaatcagagctgagtagcagttaaaatggaaaaacaaaaaaaacccagactttatttaaaaactattgcaataggggaaaagagatttcagtattgaatagaactgagctcagttccaaatatatcatggataagtggggatttatattcaagggaggcagtctggaatgaaaaattactgagattaagcatcaagagtagagggttgattctggtttaatatacctaacaggaatcttgctgaaggcaggctggagtgaccagccatcacttgggggatgaggaatttgatcagacattgaggttcatcagatatcacatttaggacgttttctttaaactgacttagcaagattctcattacaattgagtgatgccaagactaacagagacccccaaatgtagatgtctagttgggaacaggattcacaggtgccgaactaaagtttgactaactaaaacttaaactgaagagagccattgtcagcatgttatttttttttcacccagacaaacctaaataactcattcttttccccaacttctataaaaaaaaatcacttataacaaccttttaacaaatgttaatgaaaaattgtgactagtaaggggaggtcacagagaggaattttgcctcattttccattcttgttccttgttaggtatcttcccaaattatttcctggagatccaaatccttcttcctttacttgcaagaacagttctatttccatatttgcacagccactcccattcaggtttactctcaagaaaactgaggaaaccctgttaataggacccattattctcagaaagccagtagaattagaaatggaaattttctgctgacgtgcaattgatgctgtagtagcatgtgctacagttccgtgcccaggataaaatagagggcaccatgttgggagtggacagtcctactaaaggcatcatgaatggctccatgtaaaagatgactctggagctaaagcttgaaagataacatcttgtatagacggtcgccatgatcataaggtgaagtcaagagatgggagttgaggaggaaatattcaaacagatggaacaaaatgaacaatgacacagaagttccttttagctggagtgtgtgactgtgagtcacggtgtaggaatagagaggctcaggagagagaaaataaaatatgaaactatccagggagtaaggaatcaggtcatgaagaatattgtatatctgttaaaatatttgagttgaatcccttgagtcatctattctgagtcacaggaatatgttacagcatgcattgaaaatgtttaatattgaagaaccaaagtctgactttttctatcctatgtgattcctgcattgcctatatgatactctcactcagttggattgcaatatacttttttgagtgggcaagaatgggatgtaattaaagctagcatactgggacatgttcataagcctagatgctcccaaggatgtttctttcttctgaaaaccatgtttcatgtgggccagagtacaaaacaaatattgagaagcattgttttgggcattaaggattttaagcatggaagggcaaataatatttgatcttttagaaggatcattttggtagacaaataggatctacttggcagcttatcagatataactcaaagaaaaattggcaaaggtctgtattaagtagtaacaacagaaattaaaagaaggcaaattacatgaaaactattgtgaggctaggaacgagggaatgggactgaagggctcgttaactgcggaagggtaaggaagacaatgtgctcagtaatccaccctttaatgttggctgtgtttaaagccattgaaaccactttggaagaactcttgggagacatgaggcagagggtgagaaatgcctgaagacctttaggagaatttagagcatttagttctgtccaaagtaaaatccaaggagcaacgctccaaagttaagtcaatgccatgttctgggtaaatgcctcatgaacggaaatcctaagatttctgtacaatttcctcttaggactcttaaagtctttaattaactagagatctagtatcaactgcactaaaactaagctacttcaaacatactgaattatccattgaaacccacactccagcaggtgtcttgttagtcaaactgtcaccctgcctagctgacatttcaaactcaaaaagtcttgaggcactcagattgtcaaggtgcatgtgactcaaaagccacatgagaaaaagtactcaaatgtgggaagcctagggatgttggatctggagggatgtggttttgtgaatcctggccacctaattggctatgaataagtgaaatatgatccatatattgatgtacctattgatatgagatagtaaaaataattttttcaacttcacgtgcaaaacaagtgttttctttcagtctgtactcagtctcaggcattaataaatttgaaatttttctgtcatttaaggatacctattcgcagaggtgggaagatggtttctagaactaaattttaaacatacaattactcatgctcttcagtatagtaagtttatgtggctgtttattctgtcttctaaaaggagagtattctttattcctttttcaaaacctaaattcttatgtaactagaagcaaagattatattttgattaccttgtggtaagaatttaaatagaaatgacagttattacaatttattttggcttagacaagttatactatttctaaatctggccactttcaaagaaatgaaaaaatcttaatacatacagatacacattatttctcactgtcacattgaaaaatgtacatttttttcaaaatttccaatttactctaaggccagaataaaaaaaaatcatgcatataaaaagggcattgttcgaaaggtataaattctggaaaactcctaaaacagtctctgactgtccaaggtaacttttcagggtaaactgccattattaggttaagttaaaatgtgtctcaaaaaaattagtagattaaattacatttagttaaccaagaaatctgtatttattgaaaacatgctgtttgcctcagttcaggtttacattatagctcaactggcattctaaattacccactcttgcaacttgtattgcttcttttttgtttcattctttacattgttataaagtgttaccactggaactcaaatcaaattgtatcactctcttacttagtaaccttgtggctaccacctccaactctatcttttgcatctcatatacaatcagctgtggaaacactgcagtcccacttcccagatcgcttattcattcatagatgtggttgggggaaatttacaccctcttatctaggaccagctcttccccccacaccttcttctccaaggtaattcttatgagtctgtctgatatatttatttctgttttgttttcctgatgcaaaacattaaatataataagtataatgattgaaagaatctgcataattcacagaataagaattccactaatttagttgtacttctaagaataaaaatatagacatatcacaatcatcatgttttttggtctacttcaaatagacaacttcatatttattaatcagtgaggtagaatccaaactgaattcaattcttagttttgagttcttagtccttcaaattccttttacaaatattttgatattagtatatttatattcatttagctagaaattatggtccagtcctgttctcattaattaattaacttaattaataggaatgtctgagttcatgtcagggcctagaagactcatctgctgtgggaaggcatgaattccccaatgtgtctgggcatactgacaacaaacagggagagctgcccttcttaataaagtttgattgacagctgtattgtgctgagtgtgattatatggtgcctagtcctgacgggttcagtccaaaataatgcaccatgtggatcacaagcctgctttaaatgttctaccattttataattgtcaagagagagaatttagatagaatgtcagtcaagtttttctgtttacctctgcagccatgagctttggttagataatctctgcgttatctatatcacctggatttttatgaagctcataatccaaattcaattatttttatgtttttctaatatgattttagggtcccttatacagaaaaaagctgtagtagcaggtaccatttctaattcatatgaatgaaacgaatcccaccaatatggtaccctttttcagtttctataaaataatctccattccttaaaaaaatacttactgtttgtcaagaagatatatattattaatttgattctcccatttttttactattggttttggtatcatagtctcttatttaaataatagatgcaaacacagtagagaccaacagataaaatgaactcaaccaaattttctctctgcaattgacacacaagtaaggcgtttgtttaacaggccttgtgtgtatgttttgtagtaatttaaacacacagaatatactttcattttcatttgtctggaaaacaatgttgaaacctttttttttttttttttttttttttttgcctcctgagtagctgggattacaggcgccacaacacccagttaattttttgtattttttgtagagagggggtttcatcatgttggccaggttggtcttcaactcctgacttcaggtgatccacccacctctgcctcccaaagtgcagagattacaggtatgagccactgtgcccggccacaatgttgaaacattaacatgaattattacaatcactttctcattgattttcccaccaggtgcaaggaaccatcttcccagctcccaatttcaatcccataatggatgcccaaatgctaggaggagcactccaaggatttggtaagtctgattatttctaccatcttttattgtgattattttttgctttaccttgttttaagactatactgtgggtataaaatagttgatgtcttacaaaacacagatacagattagacaaaaaaaaaaaaaactgagcaaagaagtagaatgagaagaaaaataatataaaaagacaataatgatgaacaaatttgcctttagaaattgctagtctaatcttaaaatgtttgccttaaatccataagtgcctcatcactaactactaaatgaaatctccactaaaacaccttaatccaggatagagcattctttttaacctttgcttctgttttctagcttgtttcatttgctatttgctatttccacttccagtcaatcaaactttttgctattcccccaaatgactctgcttttcacatctctgtaaattggcccaatcacttctctgcctggaatgttattttcttctcttgtctacttttcatctaaattctcttcttcaagaatctgttcagatgagccttcctctctgaatccttctttgggcactgcaagctcaatcagctatgccaaccccccaggcaccttacttcctacctctcactcccctaatctcatttgcactgtgcttatgtttgtctcacctgctgactggactgtgaactcccagagcttggagtttgacatagaggtgattcataatgaatgatactaaagtttagaaaaagtatatagagagagaagaagggaggacaattttgggattcttttacaaaaaaaaatattatatatataatttttaagatatcatatggaggtattaaactttcatatagtttcctacaataaaacctgttttaagaagactcttgatgagcataaagacaaacatagacaacataaaagaaatctttgcataaggcatgcaaaaactttcataagaaagcaagctcttaactttaaagacaaggtcgcctttacaggagcttgactgtgtgtgtgtatgcatgaatgcacatctgtgtgttttattcactagcagtatcccataggaaaacaatagaggacttaaaatatgctcgctaaagctgactttaggagtttgcaatgctttcatgccttttaaaatatcagtcatcactagaacaataaaaagacaagttaacacaaagttatgaattaactttttattgaggagtgcaatttttgctttaaaactatgggtcacagcaatctgttcaccaaaaagtttttctttgctccagtttcaatgttcctgtcattgcaattttagggtcagaataaggattcattttgaccatcataatttgttgcttatcagtgtattaggctgaagtacgtcaggaggttttgggctttgattgcacggtgtccactgtagcatgccagagcatgaacacagctcaaattgctttaaagttctatccatctccatgactctggcgaagtgttattgaaaaagacaataactaatgtttttcttagctactgtgttttatttagaaaaatctgaaagcaaaaacgtattctgaaacaaatgaaagtgagtagctctgatagaaattgctttaagttgtataaaaatttactcatcatctataaaaagaaacacttattagttaacattccctaatagtacagtctactttccaatttatcaccacttgaagatactttcctgcccatgcattcttataaccatttttattttgtatctattaacatgtgtaattgctaggtcagccctgtgagatcctggacaaccgaagtcatttttaacctacattcctaaatcttgacaaaggagaacacaagtcaaaattaatcttttttgaaatgctcagtgctattcagagtggacaatctcagcttgttcctgatctttctgatcattaagtatgatgctagctataggatttttgaaaacgttcattatgaagttaaggaagttcccctctattcttagtttgctaacagtttttaacttgaataggtattggattttgtcaagtgatttttcttcatctgttgatataatcacatgatttttctcctttttcctgttgatgcaatggatgacataactgatttttaaatggtgaaactgccttgcatatctggaataaatcccacttaatcatgaaatataatgccttgtatgcattattatatctgactttcaaactttttgaggatttttgcatctatctatgctcatgagaaatgttggtcagtaattttcttttcttgttgtgcctttctctggttttggtattagggtaaggctgacctagtagaaagagttatgaagcattctctatgcttctaatttctgaaggagattgtagaaaattgatatttctttcttaaaagtttggtagaattcataagtgaagccatatggacctagtgctttctattttgtgggttattaattaccaccgacttaagtttttgatagatatgggcccattcagattgtctatgagtttgggtaggttgtgtctttgaagaaattgatccatttcatctagactatcaaatttgtggtcttagagttattaataatattttattatgattttaatgtccattgagattggtagtaatggctcctgtttcgtttctgatattcgtaagttttatctctctctctctctgtctctgtctctctctccctctcttgctttctctctctttccttaacctagctaaagccctataaattttattgatgtttcccccaaaaaaaaccagcttttggtgccatggatgttttctcttgattttccaatttcaaattcattgattattgctctaatctttcttttcttctatttatgttaggtttaatttgctcttctttttccagtttcctaagatgcaagcttagattcttgatttcagatttctttttgtttctctatatgcatttttctctaagcattgcttttgctcatctcataaattttgagtcatatttttactttcaatttgtttgaaatttttaaaaattctcttgtcacttcttcttagtctcatgtgtatttagaagtgtgctgtttaatctgtgtgtatttggggatttttccagccatctttctgttactgatttctagtttaatttcattgcagcctcagagcatattttgtatgttttttattattttaaattgttaagatgtgttttgtggtcaagaatgtggtctattttggttaatgctccatgtaacttgagaagaatgtgtattctgcttttgtggcaataagcattctatagatgttaattaaatccagttgattgatggtgctgttcatttcaatgataccctcactggttttctgtctgctggatttttaaattacttatagagtaattgacaaattactctagaggtgttaaattgcccagttataacagtggattcttctatttctctttgcaattctattatttttttcctcatctcttttggcactctgttgtttggcacatacatattaaggtttgttatatcttcttggagaactgacccctttaacattttgtaataacccttttattcctgataattttctttgctttgaagtattctttgtctaaaattaacatagctactccaactttcttttgattgcatttgcatggtatataattcttcattctttacttttaatctctctgtgtctttaatgttgatttcttgtagaccacttagtgctattaagaaataattttactcacctcagttaaaatgagttttatccaaaagacagacaataacaaatgttggcaagaatgtggagaaaagagtacccttgtacattgtttctgggaatgtacgttagtaccaccactatgtggaacagtttaaaggttcctcaaaaaaattaaaaagtgagttataccatgtgatccagaaaatccactgctgggtatatacctaaaagaaaggaaatcaatatatcaaagacacatctgcattcttgtgtttgttccagcactatttacaatagctaagatttggaagcaacctgtgcatcaacagatgaatggataaggaaaatataatacaaatactcaacagagtacaattcgaccataaaaaagaatgagatcctgtcatttgcaacaacatggatgaaagtggagatcatatgttaagtgaaataagccaggcacagaaagacaaacattgcatgttctcacttatttacgagatctaaaaatcaaaacaatttaacacatggacataaaaaagtagaaggatgattaccagaggttgtgaagggtagcggagggctgctggggactcgaggatggttcatgggtacaaaaaatagttggaaagaatgaataaaacatactatttgatagcacaacagggtgactatagtcaataataactgtgtattttaaaatatctaaaactgtgtaattggattgtttgcaactcaatggataaatgcttaaggggatggataacccattcttcatgatgtgcttatttcatattgcatgcctatataaaaacatcttgtgtaccccataaatatatatacctattatgtaaccacaaaaattaaaagtaaaaaattaaggaataattttaaattttagtaataattatgttcttgcctaggaggccacttttacctatttgaccatacagtcgattctcattattcacaaatgctatatttacaaatttatctactcactaaaattgttttataacccccaaatcaatatgcacagatatttcgtggtcatttgcagacatgtgcagagaggtgaaaaattttagtcactagaatgcatattgctggttgaaatcaaacaaggtgacctctgccgtcttcttttagctttcatgctgtaaataagtcctttatgcaatctatgtagtgacacaattttgcatttttatgctttgcttggtgattgtgctgtttaaaatggccccaagcatagtgctgaagtactgcctagtgtgttcctacgcacaaaaagaagtattcaagaaaaaaatatgtgtgtcacataaactaaattcaagaattagttatagtactgttgaccatgagtttaatgttaatgaattaataaaataatacatccataaaaaataatagaaaatgtattgatctctgcacgatgctgtttggaaaatgctgaagtaacatctattctatgttatgaagtatggaaaagatgaaaaaatggctgaatttttgggttcttgagactataactgataacaaaattaataattttaaaaaataatcaaggcagtcagctttcttttgaaagcagtgttgggtggcaggttagaaaaattctgtagatcaggaggctacagaagagctttaaaaatatctcttaaatgtttatacaggagaaggctatctggaagtatagttttcaatgctaacaagactggcttgtttcataaggacattggcaaacaaacataatgcaaatgacatttcagttgacaaaaaatattgtaaccacagggttacagaaacctaaccctgcattttccctaggaacaatagttcagtatttactaattcagtgttcatggcaaatttgtagaatataaataccacatacaatgagtcacttgtacaaaataaaatttgataaaattatgatggttcattatgcccaaattttccattaaaatcagaaaaagataaattatttagaaatccctgacctaaagcactaggagaagaaggagaaaaacttataatgattacaaagaagaaatcaaagttgtgattatatgaagaagaggttatatatctagaaattcaagtttaataaaaagttacttaatattataagagagttcagtaacttctcaggatacaaagtaaacacaaaaatcagtatcacttcttcaattaagcaattatgtgttaggaaataaaacaaaaataacataactgggaatatcaatagaagtgcaaatataagtaactttagcaaaataaaccttcttgtcattagcaaaaagctccacaaatctttactaagtcttttagagaagaaaaatccttaaataataggttggcagaaatatcatgtaagtgacagaaagacaacacttacaaaattgattcctaaatttacagttattttaatttaaaaattgtaatacaattattgagattcatataaaatatctctggaagaataaataaacaagaattgctatgaaaacttaatagagcaattcagagcgctagattgtggataatctcaacagaacaagaacaaaaagtaagactataataatttcataaatgtgataatagtaagaataagacaaagaaagtaattttaaaatcttctatttattatcaaatatatgttcactttagaatgtccatcatgccattaacagattcctctactggttttgttttgttttgttttttgtttctgccttttagttcagggtcttaaccaggcttgagccagacatcatctttctctatgccttttcagtggagtctgccttttctctcagtagccattaatttctatctttgaagccaattctaggccttcctccctccctgttacagctttcagaccatttgtgcataaaataccctgatgctccccctgcttttcagtgatacagtcatctatgttaattcttaacacttgttctcatttgctggatatttcagcaccttattcatagccttcctgtgatcctaagcccatccaggagggacttaatttcaaaaaagatgatttgcttaacattctagcttttcaattcatttttctccttatctccattatatatcttcccttgttgaagaaaaattataccagatggaattaaacagcaaggaagattctgcagtagggatcaagactattgcaagaagggagagagagtgaactcaaatcctatgaaacaaaggcaagagagtttttaagcagtatggtgagatagtaggaaagaactaaaggatgttgggcagggagggcattggtcaatgtgattaggctatctgtgattgctaattggcacttaacaaagtcaggttcctgtcctcacacagacactgggaaataggaaatacagtttctatcttcccaatgatgacatttcaaaaggatggctcccatatccctgagaaagacaattttgggttgtcaaactgcaagaggctgggaggagacttacatctctaagaggcagagaaagaatttaaaattgcatgttttctaaaataaatgctctaataaaagggaggttaggagcctgtagttgggaagaaacttatctaaattttagtcaagctaagggaaaagttaatgtcatattgctgactctactatgactgcaaaattcatctaaactagttgtgcactaaaccaatctattagcttggtgtgttggcacatgaggaagtgaaggatacacagaccagaaacagtctatattagggaggagatagacagggtgataggtgttccatgaaaagcatgacaggttcactctatccctcagaagcacacagatgccttgtactttcatgatttccttctctattactcctccctccttaatatatgttcattataagccatatctctctattcaacaagaaagacacaatattagtcaattctcacactactataaagaactacctgagactacataatttataaagaaaagacatttaattggctcatggctttgcaggctgtacaggaagcatggctggggagacctcaggaaacttacaatcatggcagaaggcaaaggggaagcaggcacatcctacatggccttcctacaaggaggaagagaggaaaaggaattgcgacacacttttaaacaaccagatctcatgagaactcactcactatcagaagaccagcaagggggaaatctgcccccatgatccagtcacctcccaccaggcccctcctccaacactggggattagaattctacatgagctttgcaaagagacacaaatccaaaccatatgattctgcccctgtccccccacaaatctcatgttcttctcacattgcaaaatataattactgattctcaacagtctcctaagccttaactcatttcagcattaactcaagagtccacagtccaaagtctcatgtgagacaaggcaagtcctttctgcctatgagcctgtaaaatcaaaaacaagttagttacttccaatgtacaattggggtacaggtattggctaaatactctctttccaaaggggaaaaatcagccaaaacaaagggactagaggccctatgcaagcctgaaacttaacagggcagtcattgaatcttaaagttcccaaataatatccttcgactccatgtctcatatccaggccacactgatgcaagaggtgggctcccaaggcctcaggaagctccgcccccatggctctgcagagctcagtccccacggctactctcaagggctggtgttgactccctgtgcttttccaggtgcatggtgcaagatgtcagttcatctaccattctaggatctgaaggatggtggcccccttctcaaagctccactaggcagtgtcccagtgtgggggctccaaccccacatttttcccccacactgccttagtagaggttcctcatgaaggctctgcttctgcagcagatgtctgcttggacatccatgtgtttccatacatcctttaaaatctaggcaaaggctccaaaacctcaactcttgctgtccatgcactcacagacttaacaccatgtggaagccttggcaattttcagcttgcaccctctggagcagcagcctgggatatatctggggtccttttagccaaggctggagctggagcagctgggatgcagagagcagtgtcccacagttgtgcagggtagccaggcagggatctaaatccaaatatcagatgttgctcccatttaaacactaatcagcttaaaggtcaaggagccatttttttagtggagtaagagctgattgaagagacattatattttcttcactcccctgtacttttgattggatttttattttcctttcaatatttttttacaaatttaaggggtacgagtgcagatttgttgcatgcatatattgcatacttgtggagtctgtgcttttagtgtacccatcacctgaatagtgaacatcatacccaataggtaattttttaacccttgcccctcttccaccctctcactgtttggagtctctaatatctattatcctactcaatatgtccatgtgtacccttcgtttagctcccacccatcagtgagaacatatggtacttgacattttctgagttatttcacttaggataatggcctctgattctatctatgttgctgcaaaagacaagatttcattcttttttatagctgagtagtattccatggttccatggtgtgtatatgccacattttctttatccaatcatctgttgatagacacttaggttgattacatatcttggctattatgaatggtaatgcaataaacatatagatgcaaatatcttttttatataatgattactttccctttgagtatgtacacacagtagtgaaatttctgagtcaaatgatagttctatttttagttctttgagaaatcttcatactgtttcccacaaagatcatactaatttacatttccaccaacagtctttaagcattcctttttttgcacatcctctccaacatctgttattttaactttttttttttttttttcttgagatggagtcttactctgttgcccaggctggagtgcagtggcgtgatctcggcacactgcaacttccacctcccaggttcaagcaattctcctgcctcagcctactgagtagctgggactacaggcgcccgccaccacacccggctaattttttgtacttttagtagagatggggtttcaccatgttagccaggatggtctcaacctcctgacctcatgatccacccacctcgaccccccaaagtgctgggattacaggcatgagccatcgtgcctggccattaactttttaataatagtcattctgactgacgtaagatggtatctcattgtggttttaacttgcatttatctgctgattcatgatgttaagcatttttcatatgtttggtggctgcttgtatgtcttcttttggaaaaaaaaaagtctgttcatatcctttgcccactttttaatggagttatttgttttctcttgttcttattgcagtagcatgctgttttgattactatagccttgtagtatagtgtgaaatcaggtaatgtgatgactttggctttgttctctttgtgtaagattgcgttggctattcaggcccttttttggctccatatgaactttaggattgtttgtcataattctaggaaaaatgacactgataagctgatagtgattgcattgaacctgtaaattgctttggatagtatgataattttagtgatatttattcttccaattcatgagcatgaaataattttccatttgtttgtgctatctatgatttctttcaagtgttttgtagttacccttacagagatctttcacttccttggttaaatgtattcctagatattttatttatttattgtaactattataaatggaattgagttcttgatttggttctcagcttgattgtttttggtgtatagaaatgctgctgattttcatacgttgcttttgtatcctgaaactttactgaagtcatttatcaaatctaggagtcttttagaggagtctttatagttttctataagatggtaagatcatatcatcagcaaactgagatagtttggcttcctcttttccaatttgggtgttttttatttttttctcttgcctgattgctccagctagggctcctagtactatgttgaatgggagtggagaaaggaaatatctttgtattgtttctgttctcagggggaaagttttccctgttcagtatgatgttggttgtgagtttgtcatatatggcttttattattttgaggaatgttccttcaatgcctagtttaaagtaatggcactaaattaggagataggaaggatccaggcttcatcaagcatcattacatgatttccaattttagttaaaattgttccctgctgtaaaataccatcagggataatgcgtgcatactggttatgatcgttagataaaggattcttcccaactacaaagtagcaactttactaatcttcaaatattattcttttccagactgtgacaaagacatgctgatcaacattctgactcagcgctgcaatgcacaaaggatgatgattgcagaggcataccagagcatgtatggccgggtaaggccactttatcttgacctatttctagggcaatctcttgagaactaaccacactcacggataataggtattttttttttcaatctcacagattgcaaatatctcagacatcattatatgtcagatacagttcatattcctcttacatgtttcaaggaataaaatctatattatgaaacaaatatacatgtgagatatgttcacactcacagtgaccagtgaccacaagttctttccccaaaatcattcagtgtccccaaatgaaaagttttgatgaacttacattgccagtgggtccaattaggcttaaagtgttgtgctggaaacacccctgtggcgagctttagggaaggcacataaaaaattaatgatcaccagttcaaaatataacagcttttcctacagttccttgcaggtcctcacctaactctcaaccaaagtgaattctctaccagcttttcctttcaccagcatgcagctatagagaccattaaaaaagaatggcagtttaaaaatagtttaaggcaataaaactatccatagtgttttaaagtaatcatactctaatttcaaagcaagtaccattaaagattccttgcttttgctatgcatttaaaccacaaattcagaacaaaaactcttcaggccaaaagtgcctgaaacaacaattacttcatcagctgagctttatcaatgaaacattatcataaaactttctcagtagagttaatccatgtaaatttactccacctctaaaccccagtctttgaacaactatagtagatgaaataaaagatatccctcagctttagattgaattaataatccaaaagctactatcagtagtgaccttagttgaagtaagccaaagtagaagaccagtgatatcttcttttccacataaactgttacctcagcctatgttccacctacaccagtactagttttcttttgaaagagaatataaaaactataaaagttgtatcactggtaatctaacattgttttaatatgcatagtgctataagaaatgtctttttttttttttctttgagatggagtttcgctcctgttgtccaagctggagtgcaatggcgtgatctcatctcactgcaacctccgcctcctgggttcaagtgatgcccctgcctcagcctcctgagtagctgggattacagctgtgcgtcaccacgcccagctaattttttgtatttttagtagaaacggggtttcaccatgttagccaggctggtctcgacctcctgacctcaggtggtctgcccacctcggcctcccaaagtgttgggattacaggcgtgagccactgtgcccagagaagaaatgccatttttaagtaacttttttttaacccaaaggtttacatacatttttgctttttacaaatcaggttaaatttagactgaaaacattactttatcaagctctacaaaactatgctaaagcagattaaaacaattttaaaatgaagtacttacactcaaggaatttaaaatctactaaagaatttatactccactgaagaacttttcactgtacatataaagtctcagagtttgttaaaccctcagttttgctgaataattcatacctcctggaaaaccttggctgatacactaaattgcactgcctggaaaactggaagtcatgtttgcctctttcctctgaaatacccttgtcatttataatcaattagcaagttctgtaaattatttctcttcacacatttctctctttaaactgacttacacagtcttgatttagatcttcatcattttgtgcccagactaatgctgaaattcctaaatggtcctgtctacccctagtcccttcccactccagtctatccccaaaccgtagccagaatgactcaaaatctaaattttcacacatcactttgccactttaatccttgagtgtttatcttgtttctccctacaaacatccgtgtttccatgcgctactaaaaagtatggggaatcctcggtccttgatcatcttgggagtaagataatggccaagtgacaattcaaagacagcagaaatctttacttgaagggaaagagggagcagagagtttatttaaagagacaggacattctgaaagatgaggcagagcaggctgctgaaagagaatgggccaacagagagtcctgggttgggtttttataacattggatttttcttcacgttccctgctctgtctcaagtctctgccttttttcattatctagtttttctgcttctgccgtaagcccttgccttttccctgcctagtttccaccccaggtttgtggggccctcccttactattagtcagtgcgcatgcgtgggccaggggttggatacgaattctatctaatggctgcactgctcattaccaccaccccagtaaggtcgtacagcagtcaaattggtacttgtgcctatatatctcttaggaatttctcctttttccttttcctttctttctgctcacagttgactaattgtccacccgctacagcattagggattctattaatatgtaagcggtgggtggtcccttgggcctaagacttcccaagcttttcctttctcaagggctccccttgagtaacccgctcatgtctagccatctgcctacacatattcctacacatggaataaacctaatgccttcccagggcacacgaagccttgcttgctttgttcctgctctccgtcttcatccctctccccttccctaacacaattttcacctgcagtcaaatagaactgctatacttgtagttcttcaaattaaccatggctgcccctcaccaccagtcatgttgttttatctatcttcaataacctgatttcaataccacaggctggacacctatcatccttccaggtactagacacaagacctcacagccccccaccagatcgagtggaacagacttgggctgctaatacatcctttttgtaatttcctcacagtaactaatgacacatctgagagcttgtttgtatctgtttcactctaccacagtctaaagctttgaaagctgggatgattcttgttcatcctagagcttaccataaatgtctgtctagcataccaagattgcttaattaatgtttattgaatgacattgtaaaggtgcatctaactacaactcctccaataagacacaggcaggctttgactgctcctgtaaactttcccagcctgtcatgctcaccctctactctgtgtttcctgcttggttccaagagatccttgtgcataatgctactgggttgtgctggttcacttttacatcttgccaataacactgtaatctcctggaaaagcagggattgtaatatttgctgctatccctccagagcccagcccaggtctggcatagaagaggcatttcatttacagaatcagtgaatctaaggcattatattctgcctatttacttttttttaaagaaaaggaaaagcatcctttcattatccactctgtagttaaaatgaatctacaccaattgcctagatttcttttctctcattccttgccctggctgctaccaggttaatttctccgaccatcagtaaggtcttcttgacatctaccaccgctcacatttaggactacttcttccacctggccaaggtgtatctcctgctacttttccctttctgtggtaagaatgtatacattaacccctatgttaatcaatggtattttaaattttcattaacaagaataatcaagagttgacagaatcattttcttagctgctgagtgaagtacaattctcagcaggctccatgaacacttcttacttgacattttacattcgtgcagagtggctgaatttcatcagctttgccttacctattgcagaaactaatccctagactcaactgaaaatccacttggaattccgctgattgacatatttatcaaagtaattcatgaggtcacttctgatcttccccaccaaagcaagtgctagttaaaaacaatgcagtgacaccaagggaacaatgaaatgcccttgtgaatggggagaagaataaacagacaatgattcttggagaagttcaaattcagcattgatgcaattaattttctcatttttcatctaaaacagggactatccggtctaaaatatgctggtttctgtcattcatttaacccacatggttggttaagcaatttagtgccggggctgacttgcccaaaagtaaaacttcaaccaaggtcatctgactattaaattgtctcttccacagcttctcagtaatgcccactgttctcaatggagcaaacactcaggcttacaagggcagacatctatactgccaaatccctcacatctttcaaggttttgcttaagtgtcaaatactcaagagggcctaatctaaagctgtcactcaccccaagccctatgctagagctccagatacccctcacctgacccacaggaggaagtccagggcaagcctatcatctaacagtcttggccagtgagttaaggcaatcctgaatgccttctaaggccaaaatggtgtaattaagtgtcctctctccaggtgccaagattgttgttcttttttttttccttttctttctttgagacaaagtctcgctctgtcacccaggctggagtgcactgccgcgctctcagctcactgcaacctccacctcccaggttcaagcaattctcctgcaacagcctcccaagtagctgagattacaggaccgtgcaaccacgcccagctaatttttgtatttttagtagagatagggatttgccatgttggccaggctggtctcacactcctgacctcaggtgatccacctaccttggcctcccaaagtgctgggattacaggcatgagccactgcgcccagttgttgttcttacttaccactagaaaattgacctgttccattccagtagatataacttcagtttttttctatcatttccaactgatacctagaactttaatatggaatggtcaggtgcaagagggacaaagccatttgtatacaatttccggaaagctattatgtcccacacatagtgtaccacacatagtgtacccacaacaatgatccttaaccttatgatctgggatgatgagattccagagagaatccaagtgactgaaccagaattgagtttgaattcctatgtccacttttgattaggctgctacccagagaatagaccaactaggacaccctgaggttggtattgtaatcgcccagtggtttctccttgccctgtgacaagacagagctggtttatcaagacaggggaatatagagtttaattcacacagagtcagctgtacaggagacaggagttctattatcactcaaatcagtctctccaaaaacttggggattgggatttttaaggataatttagtgggtagggggtcagaaagtgtggagtgctgattggctggtacagaaatgaaatcatagggagtcaaagctgtcctcctccactgagtcagttgctgggtgggggccgcaagaccagatgagccagcttatcaacctgggtgttgccagctaatccactgagcacggggtctgcaaaatatctcaagcactgaccctaggttttataatactgatgtagtattgcttcccggccttttggataagatcaagtgtataacactgatgttttcctgaggaacaatttagggaggttcagaatgtcacagcctccagctgcaagactgctaacccataatttctaatcttgtagctaatttgttagtcttgcaaaggcagccaaggggatttgttttagaaaagggctgttaccatctttgtttcaaagttaaattataacctaagttcctcccaaagctagttcggcgtatgaccaggaatgaacaagtacatcttggaggttagaagcaagatggagtcagttagccagctctctttcactggaattgcctcggttgtaagttttgcaaagttttgctaacaccctacccactaaattatcctttcagtattaagagaaagaaagaagcatcatgcttagaaaaggtcagagtgaaatcccaaattttacaaataggtttatatgacccttttcctccatcatggtcattttccaagaaattgaaaggaggttaatattttccaggaaccgctgaattcagggaccaaacttccctactaagctaagtaggccagatgaaggtcaagaagatagagtcagaagtcttactgagctgatcaatttgcagcaataccagaagcctagggatggtggagatcatcaaataccttgactcttagtctattgttgagtggctttttttttttctttgagacagagtcttgctgtgtcacccaggctggagtgcagtggcatgatcttggcttactgcaaactctacctcccaggttcaagcagcctcctgagtagctgggattacaggtgcatgccaccacgcccagctaatttttgtattctcagtagggacggggtttcaccatgttggccaggctggtcgtgaactcctgacctcagatgatccacccgccttggcctctcaaagtgctgggattgcaggcatgagccaccatgcctggccttgagtggcatttttaataaaactgcatgatggtcagatttcaagtagtctagaaagccaaaaacatggcacagattattttcatgggccacagtgatgtggcggaagtcagctgattgacctgaaacagcaatattgtaacttgaaaaagtgttatcatttgtgaggacctacagaactctatgaggtaatcaaagtctgatgcaatccatctgccagaactacaggggcaatatcctatgaattgtgatttcctttgccaggaaaaacgcaagtcaacctttgacaaaagtgacaagattggcaagcggtggtaaccttggcgtcagaaacatagaatgctttaccatatgcccagcttttgagggtatatgtgttgtgatgtccagtctgatgatgaatacaggtagcaattgtgtgatctgagcaacgcaggctggatcagcacctggattccagttggtctcatcagagaatcagcccttactgtggacagctgcaagaaggacacaaaagttatcagaacctgcatttttccccccacagactacagaaggaaacttctgtttaatatgcagtttgtgtttttccaagagttaacccaaagagaaggctaacagcccaagagtgaataaaaacattgagtttatcaaagggaacactgttcagagctataatagccttgatttctgcccatggggcaataatcattctttttttgttctgcacaggtgtttctgagttgagtagccacagcatcccagtggacactatctggtttcagcttatctgaatcgccagtgaaccaggccatggcatttagggcaacagattgaggtccccattgaatcagcagcttgctgatttccccaaaagtttcccccagtggaatagctaccatttttttcatgtaaatgcaagacactgcagggtccaggcctactggattctttgatgtaccacttctatttgacaggtgagactggctggtttcttccaccttgccattcattgagtcccagttgatttaccctaatatgggaatatcaggcatcagggtcacaaggcctccatggatcaggcattcagtttatacaagagtccaatagcaggccagtagctgcttttcaaaggggatatacctggaattgtatcaggaaggcagcaagtttaaaacatcaagaggcgcctttgagaagctgctttcccttgccagaggctccaatcagcaaaccatctatcatagaaacttatgcctgaaagtgatcattaggcttatggggcttcataggtagtagcacttcttacatatgctgttttcctgtggaaagcatcccctccagtatttaggagcattcacagaagaaacaaataaacatgaataccaagtacgttcaacagtggaagttatactagtctaaaggtctccaatcataaggttttttgactttccttctccatttcaaaccttgttcaaacccatcctttgaattcgggtttactttcaccgatgagtccaggtagaatggtgacatggacacctgcatccaacagattcacatatccttgagtcctcctgctccacaaaggcaaatgggcatggccctagtccacaatgggaataggaagatctgtgtcccaccctcactcacttttttcctgaaagcagtagaagttggggtagagggaaggaaaagttcaggggacatgagggagacagaggctctgcattagtcagcatgacacgttgatatcctgtacagtggctgtgcacacctcaatcaaatgaatttccaatggttttggcctacacaaagtcctccatcaggtgcaacttcatcattactgaccccatgtgtttcagctttgtgggcccttgagccagaggtcagaaccacagttatttctgtcacagccaaggggtttgagtcctttgagtgaattgggtttgacccatatgtgacaattttttttttttttttgagacggaatcttgctgtgttgcctggagtgcagtggcatgatctcagctcactgcaacctctgtctcctgggttcaagcaattctctgcctcagcctcctgagtagctgggattacaggtgcccaccaccacgcccagctaatttttgtatttttagtagagacggggtttcaccatcttggccaggctggtcttgaattcctgaccttgtgatccacccgccttggcctcccaaagtgctgggattacaggcatgagccaccgtgcctggccatgacaattttttaaaatgagtcagtctttgaaatggactctatcttacttgctaacctatgttcacaataacatctcttacctcaagttttttcctgtaattgacataggagctggggaaattttctaggcacatattattattgatcaatatttttattccaccttgttttatactccctcaaattagtcattattatgccattgtataagttagtgtttctttagttttatttgtgattcttaatttatttgtacatttttcttctaatacccaattctatgtttctgatttcgatgtgattttttttcaaaaggacattcattagcagttcctttttttctggaaataacaaataaatgttaaattatttcaatctttccctgagaatatttttattatttcctcattgttagatattagtttagatagctatagaattctgggtggaactctagttattttcccctacatctttgcaaatataacttcagttttgttttttgttttttctggcccttatcgacacttctgagaaaactcttctgacatcaagaggtattattttgtttgttttgatccttttttctatagattctctgttattctctggatgcttttaagatagttttctttatttttggtattctatagtttcactgtggtagtcaacaggcttgtacatttttgtctaaatagctgaggattcacgtattctggaagactggaaatagtgtctctccagcattgtccacattctctcctactgtaaatccttttagaccaaagtctgtccgtctcattcaccctttcaagtctgttaactttatgttaccatataaataccatatatttcttgtccacatatgtagaatatttttgtcactttaaaatgtattttcccaatgtgctgatttcattttcagttttttactagctactctttttagtttttaatttctagaattttatttgctttctttaaaaagtctgttaactttttttcatagtattccctcagattgttattaatgatctcaaattcatggggtttcaattctgattgttgcagagtccactatatcacctaggagatgggtcttgttttttgtttctttagggagaatctttttctgttctggagtgtcagagaatttctgaagattggttttgcatttgcttcttctgttccatgagaatcactagtttgagatcagctttcatgatgatttctcttcatggaggtctcagttcatatgagttaaataaatttgaacttcaagcctcaggaaagcacaggtctattgtttcagattatcagggaaaatgttctcctactcaaagcctaggcaatgagtggtgagcgtgagctttctgccaatctttcaatgctgaataatatttttcttctagttcacgctgctactgaggatacaaccctttgaggatagcaacctcatatgtgagatttcagacttgattccctgtgttacattgcccagtaaatgttctcttctcctcatacagtgcccgaaattaggcactaaagcctaaaccaaatagctctcaaaaccagcctctactttccccagtcacctgcaggatcgtctccaaggtcagctcacttgcttatcttctggttttcattttttcctgatttttacatcaagcggtttctctttcttctgaaatcatgtatactgttaaaagtatttctgttactttttatcaggtatttgaaaggggagagtttagatttaatataccatgtgtgtctagaagaccaaagtattatcattattatcaaacaaaaaaccccaaatttcattgaaaattaaataattatgtaaactgcgaaaatatctgtaaaatgaagctattcgaaagaatattctcttaccactgcaaagtgacgaagcaacttgcacaaacatttttataatactgtcagctgaagaataacaaggttcataaatttggaaaagaaagctttatgttttataaaaggttgcagcctgcagggtggccattctgacaggctgggaagcatggtctcctgccgaaaactggaaacagacactttgatagccagaagaataagacagaaatttatgcagaacagggtggctgaatatacatattcaataagctataggagtcatgaatatttatgaaaggagaaacacgcacatgcgcagttaagcttcatacctctccacaggacccacgttcaaaacatggtggtgttagcatgttgcgagggtggaattttcagccctctgacactgaaaggtgacagaaaaccctcactgcacatcctccatagactggccagaaccactaagcggtcagtggtctctagccaggaaagaatgctggctggttgttttgtctaaaccacaaaaaggagaggcagtgtaagagggttggttgatatcaggggtggagtaagtctttccaaagggctggtttctggttaactcttaggaaagaaaggcagtgagctagggagggggtaccataaggtgtattctaaattccatcccatcattgctaggaactcagttttcaagattgctctggggcccccttggccaggaaggggttcatccagtcagttgagggacttaggatttcattttaatttttcaatataatataaaatgatgcaagtatttacatagtgaccactgggggagggagatagaattaagataaattctaaatttcactttatacagcatgcatcattgatatttaaacagcaaagaacattttaaataataatagaaaaagccatataagtgaaaagcatatgaaactattcccctgagcatattcagacaagaaagatgttagtcttacttctatttcttgcccctgtttatccataataagataaaggtaagacgaataagaaataagaaaatgccattttatttttaatttaaatggagtggttagaatagctgcagcaagggtagtctgcagtttcattggcaacacagaacagctcaatttgcaaagcaagtactcattagcttaatgtaaggccaagctgtgattccagcagagtctgctttagggcaagtcttcggaatacaggaaagcagaggcagtccagctggggaaagtcacgctgcaaaggttgcatttgaaaagtggtgtatatatatataaatcctagtgagaatttaatactctaattagagaacctatttgaaggctccactttgaacttgtaatgttcagttatttaaacatgttattcgatatttatcttcccaactgaaagtaacacctccttccagtgtcctgataatagcatgctattcccattactatagcacttaccaaattttgtattgtaatttaattgtaattcctgtatttctctccactgaagaaaactgcttgatgataaggaccttcacttatttatgttcaaattgccaagaatgactccaaacaaataattgttgaactacaagtagtcctcattcactctttcattcactcattcattttgtacctatattgtaagtgacgactatgtaacaggcacagttctatgggctggtgaaatagccgtgaagaaaacagaccaacagctctgcatgatggagcttacattctacctattccacctgggtgggagagatcatgcatagaaggcaataaatgctttggaaaaaaagcagaagccaggtaagaaatacaggaagtgtggggagatggggtgtaattttaaacaggataaacagggcaggcttcactaagaaggcagagggggtggaccctgtgaatacctaggggaagaacattaagggcacagtgaagggcaaaagtaaaggccctgactcccacagatctgctattccaggttcagaaagaagcccgctgtagccagagcaagagaaatcaggagcaaggagaattgtaggtgatgaagtcaaagttaccaagaagatattatgtatcttgttgaccatgtaaggactttgtcatttacatgggaataaaacactgagtgttcattttcttctaagatcaagtgtataaaataatggtatagtttattttggagtgtggcttgagagaaaacattttgagcagaggagtaactaatttgatttttattttcccaggatcacactctcaaggttgttgaaggagattgcaaggtacaaggacagaagggaaactcgcttggaggctattatatatacataataaataagtaaattacatatatatatatgtatcgcctcccagcaattctatttatataaaatatattttatgtaaataaaatataactcatagggcttatttaatatttaatatataaataatatctatattatatatataaacaatatatctattgtttttgagacaaggtctcacagttagtcactaggctagagtgccacgggacaatcacagctcactgcagcctcaccctcacgggctcaggtaatcctcccacctcagcctccaagtagctaggactacaggtgcatgccaccacactcagcgagtttttggcattttttgtggagacggggcttcgccatcctgcccagtctagtcttgaactcctggactcaagcaatctggcggcctcagcctcccaaaacacaggcatgcaccactgtgcccagccagaggctattatattaacaaaggagagtgatgatggtggcctgggtaaagatcgtagcagtaaaagtagtaacagttcatcagtttctagatagatttgtaagttgcagacaatagaatccattgacaatcggatatagcaggggtaaccaaggagaaaatacagtcatgggttcttagtttctgtttctggttgggccaagaaagggccttccccatccctcttttctgcttatcactagagagagaaactaaaaaccatggcttcaagctgctaaaagcctaaagcaaaaaaaaaaaaaaaaaaacaaaaacaaaaacaaaacaaaaaaaaaaaccaataacaacaacaaaataagacaggttggacaagcttgggatatagtaaaggttgcaaaaaatacgggaaaactgtgaggtgaagagagacagacaaagatgggggacggtagagaaggaaacaacctaactaatcatgttttatttgcaacaagttacttaaggttttgtggggttggaaagacatatattgaatgcctataatatgccataaaatattttcagaattttacctgagttaaatcttttaacatttatatcaactctgcgaggcagatgctgtgattattttcactttgcagattgtgaaacagacacaaagaagttaaggaacatatttagaatctcttagctggtattttgcactgtgaggattcaagcctaaaaaccctacctccagaacctgtacattcgaacattagatgatatctgatattgtttattttcctgaaattatattatttcttttttttttacaaaattagttcactgtaactatagctatgtatacacacacacacacacacacacgcacacacgcgcgcgcgcgtgcctctgagttgaaaacaaagatacaagcgccatctactggcactactaatctcagtctacaattcagcattagtacaaaaatatcatatgtaaagggaagaaatatgttgtgatacatgtgtagggtgggagtagtgatcaaataaatgtgactaaaggttaaataacaaacttttgcaatgcttgcatagtcttcagcttgaacattgccttttttatcctttaccaagtttttctttatccacattcatccattattctttcatttgcttatacattcatgtatgtattatttataagctgtactccacatattttgtgcactcagtactttgctagagctagatgctgaattttgaagaatttgtgagaaagtccatgtcctgatagacttttgggggaaatatgcacatatatttatcatataatgtggtcactgaaatataataaacgcaaagataaagcagtggtggccaggaagtaatcaatttcacttagggatagaagaaggcccatggaagagatgatcattttaatttttctacctttctatcaactgtcaagtgccactatcctgtagagataaaagtatattgaattgatccatttgcattcaaaccttcaacgcattgccacaagatttattttaaaatgcctaaaatgtgccacaggtaccacctatttgctatgttcatcactttggtcgcatataattagtggcttcctatggtgctagctatgtcacctttgtgtgcctgattttcttatctacatagtggaatgaatacagttcctaactcacagggttgttgtaataaattattacagttattctaatattcagaataccatctgacaaatattaagtattcagtaaatgctagttgttatgataatcatcacattcttctgcctggcctactcaactttccattattagggcctcatggtataccctttgcactacaaggacatccaaagtctcttttgaaatattcagatttcaaatcaacccaacatttactgaaggctagctgtatacttcacaggcacgtttcactctacccagaacagtaccttctctgtcctgaaacattatttattgttggtatctcctaagcctttgcctgatcaaatcccactttatctttcaaagctcacctcacaactacgctttccacgaaccttcattttatgaataatatctctaatttatacattcgtacaattctgtaagtttcaaagccttgcccttatattgcctctcttgttggcccttagtaatatatatattatattatatgtattacattatatataatatattatatattatataatgtattatatattatattgaatgtattatatattatatattatattatacattatattatatataattatatataattatgaattatatattttataatatataattataaattatatattatataatatataattatatattataaaatatataattatataatatataattatatattataaaatatataattatataatatataattatatattataaatatatataattatataatatataattatatattataaatatatataattatatataattatacattatatagtatattatatataattatatattataaaatatataatatattataaatatataatattatataatataatatatgatatatcatatattatatattatataatatatgatatatcatatattatatattatatataatatataatatatgatatattatatatgatatatgatatatcatatataatataatatatcatatatgatatatcatatattatatgttatatataatatatgatatatcatatattatattatatatcatatattatatgttatatataatatatgatatatcatatattatattatatgatatatcatatattatacataatttatattatatgttatatataatatattatatatagtattatattatatattatatattatatatcatatattatatatattatatataatatttattatatataaatattatatttatttatatttatatatattatatataaaaataatatatattatatattatatatattatattatatattatatattatatataatatatattatattatatgtaatatgtattatattatatataatagtatatattatatataatgtatatattatatataatagtatatattatattatattatatataatagtatatataatatataatatattatatagtatatatgttatataatatattatatagtatatataatataattaatatatattatattatatattatatagtatatattatatatactatataatatataattttatatatatagtaggtgaccacattgctttttaagtgcatatttcttgttttttgttttgttttgttttgtttttttgagacggagtctccactctgtcacccaggctggaatgcaatggcgggatctcagctcactgcaagctctgcctcccaggttcacgccattctcctgcctcagcctcccaagtagctggaactacaggcacccgccaccatgcccagctaattttttgtatttttagtagagacggggtttcattgtgttagccagtatggtctcgatctcctgacctcctgatcctcctgcctcggcctcccaaagtgctggggttacaggcatgagcaaccatgcccggcccctatttcttgtttttatccatcttggtgatgtttggctggagtaaagggacaaacacctggcctccaaacaggagactctattaattttgaataattttacaaactcttcctcttacctaggattctcatgtcacctctatcctcaggcttattaaaaaatcattcctctagggcaccaatattaatgatgaagttcatattttttctaaggtacactagcgtggaaaaaatgctaaaactactaaattacctgataaataacttgaaaccagtgatctagtggtatggcatataaatttgaaagtagtgaataaattgaagactttgaaaatacattatagatgccaaaataacattttaaaattaaaaattcacaatattgagtacaatttctataaaataaactttatttatgttaatacagtttgaacacaacacaatcaaggtatagatcatttctttatatttttttttcttttttgatacagagtcttgctctgtctcccaggctggagtgcagtggcatgatctcggctcactgcaacctccgccacccaggttccagtgatcctcctgactcagcctcccgagtagctgggattacaggcgcctgccaccacccctggctaattgttatatttttagtagagacagggtttcagcatcttggccaggctggtgttgaactcctgacctgactctacctgtctcagcctcccaaagtcttgggattacaggcgtaagccaccacgcccggccagtatagagcatttctaatacctccagactttgtgtctgctcctttgcagcccatctcctgacatcctcctgctgaaagaaaccactgatctgctttctacttgtccttatagatgaatttttgctatttctagaatttaatataaatgtaatcatgtcatatgtgctcttttatgtctagattcattttctcagaataatgtttttaaggttcacttgtgaagctatgtgtattcttttattgctatttttctagtgcatatatataccaatatttgtttattcattcacctgttgatggacattcattttcaatttgggattattatgaataaatgtgctataaatattcctgttctttgggtttataaatgttcatttttgttggttaataggaatgcatttgatggattgtttttaaatatatgtttaaactcatgagaaactacaaaagagtttgctaacgtggttgcaatatattacattctgatcagtgatgacagttccaaatgatccacatcctcaccaacacctggtattatcagtcttttaattttagctgctctagagaatatgtggtggtatctcatgatggttctaatttccattagtgtcatgaccaatgttttaagcatgaaaacatttaaacattccacaggcttattcccagtttgtaagttttatttggtgaagttctagttgaaaggtcttgtccatgttttcatcagaatgtcttaactgggttttaagagattcttgtatcttctgggcacaaatcttttgtcaaatatgtgaagtgacaactgtggttctcttttactttcttcaaagttccttacaaaaatttaaggtttttatttcaaagaagttaaattcatcattttttcatatattgtttattcttttatgtatcatgtaagaattttttgtctacaccaagtggcaaagatttgttctggtactttcttctagaagatttagttttggcttttctttttaagtatatagctctagtacaaattgaaatagaatatatcagtaagagcagacatccttgccttgttctcaatcttagaggataagcatttagtttttcactggtatcctcttccctgtagaaattttgtaaatgccctctatcagtttgagaaagattccttctttctttgctaagaatttttttattatgattatgtgctaaatattctcaaatgcttttgctacattagttggtttagatatgtgtcctctccaaatgtcatgttgaaatgtgatctccagtgctggaggtgggcctgaagataggtgtttgggtcgtgggagcggattcctcatgaagagctctttccatgagtaatatgttccccttaaagagcctggcagctcctccctccagctcttgctccccctttgccttctgccatgattgtaagcttcttgaagcctcatgagaagcagatactggtgccatgcttcttgtacagcttgcagaaccatgagacaattaaacctctttgtaaattacccagccacaggtttttctttatggcaacacaaagtggactaacacgctacttctattgatatcatcatatagctttcctccttatactgctaaaatggaaatttacattgattaattttcaaatgcaaaccaaccttgcattcctgggataaaccctacttgctcgttaggtgtcattctttttctgtgttactagatgtgctttataaatatttgaatacacatgtttgtgtctaggtttataagggatatcagtgtgcaattttcttatgaagtttttattttaatttttgtattacagcaatactggccagataaggtaaattgagaaatcttctatcatccactaatttcttcaatattttgtataggatttactttaccccttccataagggcttgatagattacattagtgattccacctgggtctagagataggcgggagcattaactacaaattcaatttctttaattaacattgggaaatctaaattttctatttatgcttgagcctattttggtaatttgtatttgtcatggaatttgtccatttcaactaaattttaaaatatagtggcagaaatttgtttataatagtctctttttaccccttagtgtctacagtatacatacacataactcttacacttccaatattggtattttgtattttctctcttgttataatgcttttatctactaaaaaagaaaatccacagtgtatgaaaggtggtgttggattatgccaaataataaaatgaaaattaggactattttgtagttatttcaatgtggaatcttttacttgaattccagtattgaaccacctcagaaccaaagtattgcatgtttttaagtaaaactgaatatgctttacacagtttagtgagagaccattttaaacaccgttcagatttcttggtaaccctacagaaaataaattgagtatatatatattttttccctcaaatgttattttaagttcagggatacgtgtgcagaatatgcaggtttatttcacaggtaaacatgtgccatggtggtttgttgcacctatcaacctataacctagatattaagcccattatccattagctattcttcctgatgttctccctccctgcttgcccccgcccccaacaggcccagtgtgtgttgttctcctccatgtgtccatgtgttctcatcattcagctcctacttgtaagtgaaacatacagtgtttgattttctgttcttgtgttactttgcagaggataatggcttccaactatccatgtccctgaaaaggacataatctcatccctttttaatagctgcatagtattccatggcatatatgtaccacattttctttatccagtctatcattgggcatttaggctgattatgtatctttgctattgtgaatagtgctgcgatgaacatacacatgcatgtatctttataatattaatataatggtttttattcctttgggcatatagccagtaatgagattgctgggtcaaatagtatttctgcctctaggtctttgaggaatcaccacactgtcttccacaacggttgaactgatttacactcccagagtgtaaaaatgttcctttttgtccacaacctcaccaacatctgtggtttcttgactttttagtaatcacccttctgactggggtgaaacaatatctcactgtggttttgatttgtatttctctaataatcagtgatgttaagcttctttccatgtgtttgttggctgcacgtctgtcttcttttgagaagtgtctgttcatatttttcccactttttaatggggttgtttgtttcctgtaaatttgcttaagttcttcttagactcactctggttattagacctttgtcccatggatagattgcaaaaactttctcccattctataggctgtctgttcactctgatgatagtttcttttgctgtgcagaggctctttagtttaattagattccatttgtcaatttttgcttttgttgcagttgcttttggagttttcatcatgaaatatttgcctgtgcctatgtcctcaatggtattgcctagattttcttctaggttttttatagttttgggttttacatttaagtctttaattcatcttgagttaatttttgtatatggcataaggaaggtatacagtttcagttttctgcatataactagacacttctcccagcaccatttattaaatagagaatcttttccccattgcttatttttgtcaggtttgtcaaagatcagatggttgtagctatgtggtcttatttctgagttttctattctgttccattggtctgtgtgtctgttcttgtaccagtaccatgctgttttgattactgtagccttgtattatagtttgcagttgggtagtgtgatgcgtccagctttgttctttttgcttaggattgacttggctattcaggctctttttttggttccatatgaattttaaaatagttttttttctaattctgtgaagaacattaatgggagtttaatggggatagcattgaatctataaattactttgaacaatatggccattttcatgatattgattcttcctatccatgaacatggaatgttcttccatgtgtttgtgtcatctctgatttctttgagcagtggtttgtagctctccttgaagaggtccttcaattcccttgttagctgtatccctaggtattttattccttttgtagcaattgtgaattggaagtcattcatgatttggctcttggcttgcctgtttgttgttgtataggaagagcatatatatatttttaattccactttacatttgtaaaataaaatgcaaaatatttttatgtctgttttcatagcacatttagtatgcatgtatttctctttaagtgtttgactttcaatatttaaaataatattgcttgttatttgaagaaagttctaagactacttaattaatttacataagctgtttggcaatagtataaccagggacttctgctaaaagagactgttgcaatgataaaataaaataaagtgcatattttctttaaggagtaatgtttcagtaattccacaagaaaactaaagacccccaattaaatgtttttaagtttaacttttacatattttcataatgagatcaaaagaggagttggagtttagggtcagaaaaagaaaatcattctatgttcaaatgtctacaatgtgcatatgctatgtcatgcaggggtgagatcaaatcaacaattttcaagttcatcatctcatgtaatgcatacatatacatgtgaatcagacttgttatgctgttattattaaatgacatggaaaagaaaatattaaaagactttctgcaattatctcatttctcttgcaaatttggtaacatataataaatatatgtactttttcctccacaggacctgattggggatatgagggagcagctttcggatcacttcaaagatgtgatggctggcctcatgtacccaccaccactgtatgatgctcatgagctctggcatgccatgaaggtagtgatctgatccaaaaatatgcctgtaacaagtacaggccagtatttcagtagaggggaaactgccctgtgatgctcctacatacttatatgatcaaggagaggggagggaatatctaaacaatgatgtaacaatggaaatgttgtggtcaagggcagtggccttgttaggaaggtggagcctcctgggctgagtggctgggatcagcctgttcttttgttgtacaaagtcacaaacttactgagccagccccagtgctgacctacaacaaggaaaagtgaacaagcctccagggctattcagatttgtccctgagcatgtattcctatattgaggataatgtattaaaaatgatgtgaatcttgttacattatttgtaaaaatttgattaagtcaaaagaagatattgaatcagggacaatatatagatgatgtctttatattttctttttatgacctgaagttcattctttacagaaacatttttttttttgctcaaatgtataaaaatcttaatttggaagaattagaatcagtgtttcttacaggaaagtcatttccatgaaataagttgactgtggatttgttacagattttgttggctaggtacagggaacaaagagggccttggctttacttctttccaaatgcagatattaaacacctgcagaactgttgaaatcattccagtacgatgcttgccaatgaccagattaccacaatctgtgaacaatgtgtgacagaaaagaggcaacaggaaaaaaattaaaggacatggattttggccatcacatttactgatccaaataggcattgtacaaaaattatatgaattttaactaatcgcttttaacacatgttacatgtcaattcctacctcttgcaaaattatgtctaaaaattatttaaaaaataaagttatatgtttatatgttgctgttttgattaaacaagtgtgttttatcaataattcatagaatgctaaggatttctgaggctttcctaaaaaaggtgtattgtctttaagatctctttcacagaccaatatatccatgtgtctgcaagagaccacagaaagcatccatccaaatatttatgcaaattgtacaaaattccacatctagagaggcaggcacaggtccctaaaatattctcggcaaattagaaaacctgtattctaatgtcagcttgctaaagaattaatattccagcagcaaatggaatatcaaatatcattccaacagcaaatggaaatgctcaatgccatgagcattgcttgaacatgtctttctccacattgtttagaaatgctcatactgttttattctaaatgaagaaacagtttccttcagataatattaattcttcagggtcaaataggtagtaaatggcaaagctgaaactaagattgtgcctgccttcatcctaaaccacttcctttccctgccacctctcaaaacactggaaatgctgtatccctttcttgtacaaaaggtacactattacttccaataaaaatatccttacatttatctcttttttcctttctctagggagtaggcactgatgagaattgcctcattgaaatactagcttcaagaacaaatggagaaattttccagatgcgagaagcctactgcttgcgtaaggaaatatacatatgtgaatatattttacacatataagaactttataacacattaaatattccagtttatgtattttgaagaattatctaagacattcttacatttaacataggattcactgaggaccaattaactcattaggtaaaaccgattattagtgcactaaaaatgaaaccattctctagacaatcaagttaagcaaattttccaggaaaataattacaagtctctatgaggtgaatgttttcattaagacaggaaagtgtcccacattttaattcagggggcatttcacctcttacccaggaaagacccagcatatagaaaaaataaggtacaataatggctcagtgaattctacaaatatatctgcttcgctttacataaatttcacattcccgtaatctactacaaaatcagatttttatacatttcaaaagtagaaagggtaactattttcactttcaaaaaggtataatgccttaagttctattgcgttatgtagtatatgacattgtgtgtcaagaaaatgttgcggacagtcatctctattgcattcaaacaaaaacaagacttttctgaagggaatgaagtcagaactttcactaaaatgttaaaatgagatgaagcacttagaaaaagtattgggctgggcagcattctgtggaaatagaatgcataattctgaattttgagaatcagagaatgtgaaatgactctcaatcctgtttttcaattttggactaaagatttttaaaaaatagtcctgtgcttatgttaccattaggtgacagaattctttggcagacggtttattgacaaagaaatgtcaacaggtggactacatttcctggactttgtactcacaactgggaaataacattaacttactcaaaacacactgatacatagttctataataaatcatacctttaacatgttttcttatacagaatacagcaataacctccaagaggacatttattcagagacctcaggacacttcagagatactctcatgaacttggtccaggtatggcattccaaaatttacattactttgcactatctaagcaaataagtatatgtcattgccaaaaaaaaaaaaaaaaatagaacagaaaactccagtatattacagttcaatagtaaattctgtgtagtaacatttactgaagccatgttcaaaatactcaactagaaatttaagttgttaaagacaaatatggataatgcctcaactctattttcaaaaaattaaaaatctattctaaagagattataaatatacatgtatgtataattaattttatattctgagaaaattaaaagattaaaaatattacagttaaaattaataattctaattagaaataatttctttctttctttctttcttttttgagacagtctcgctctatcacccaggctggagtgcagtggcatgatctcagctcactgcaacctcctcctcctgggttcaagtgattttcctgcctcagcctcccatgtagctgggactcaaggcacgtgccaccacatccagctaatttttgtatttttagtagagatggggtttcaccatgttggcaaggctggtctcaaactcctgacttcaggtgatccgcctgcctcagcctcccaaggtgctagaattacaggcgtgagccaccatgcccagccttagaaataatttcatttttaaaactgctacatgggcttagcgcacactaacatttctgagctcctacaatgtgcctagtactgtgtgaggagagaaacaattttctcatttaataacaacaaaacactataatacaaatattctcataagtacttcagaaaagaatagagaatcacaaagtataaagttctagctctatgattgtctgaagagctaataagtagaaatccagaatttgattgaatgctagagactctaaatgccagcatatgatctttgatgcagcctataaaaattctgtggtgttatatattaccaaaaaggaacactacttcaagttaaaaatagattttatcatttatgtttctgtactggctaaatgatatataagtatttccatttaatgaatatttcttgaaaatattccacatattagcattgtaatacaaataatatttttaaagatataattatctcctgttttatacatattctccaatgtgcctgttatcctatttaacaaaggcactcaggaatgcaaagagaaagagggtcagtgttcagctcttaatttctaaaagagaatctcaaaggccacagctgagaaacatgtcttaaaagccagaattttggtttggtttggttttgtgtttcgtgtgtgtgtgtgtgtgtgtgtgtgtgtgtgtgtgtgtgtgtgtgtgtgtttgaaatgaagcaagagtttctaaacctccaaacctttcctttacacatcaaaggcatagtagttagcaaagaattagtagtcaccaaagaatttcactaaaaccaagaagttgatagaattttgtacatgggaacatgacattagaaaagatttcaatgccttttaaaaaaagaatacatgaaagcctttttagtgggaacaaagctggaagagtaggacctaggagagagaaggatctatagtccaggtggaggggactagagtgagaatcctgcctaaggccctcaggaacacagagccccacactcttaggtgaggagttagaatcaccagataaaaacgcaaggtagataattgtctattctttcatccttttctctgaacccctccagtcccaattgcttccatgagttattggatttgtttttaatctaaacgtttctgtggctactgtggataaactctgagaagtcctcccctgtcctttatcctgcttggctttatctgaagaggtgctatggagaacagacagtcctcagtccctgaatttttatggtctgacttatctacttcatggtacctttctactttatgatggtgcaaaactgctgcaattttcacataatagttgatattccataaattatgtgagatatgtaacacactttattgtaaaataggctttgtgttagataattttgcccaactgtaggctactgcaagtgttctgagcacatttaaggtatgtgttcaataggttaggtgtattaaatgcatttttgacttgggatattttaatttacaatggatttatcaggacgtaaccccatcataagttgagaagcctctctatatccttgtaccactttcatagcagctcaactttggcaaatttagagtcctcatattttgtttatagcacacgttatcaatatttctttaatcttagtttgtaatgtctttgaaaatgaggatctctaaaaacttagaagagttgtgatctacttgcttttggttaggtccatttaccacttaaccgcatgcaaagttctttcctagatatatttctccggtatgactttctttgcatccttgctccctcatttatgccttttttattttcacgactcaaaaacatttccttgaaggatctcttagaaggtaaaactggccgggtattactagagggctgagtcataacaaacccttacttttcaaagcctcttcaagtctcagcttacattgcttggaatcagtaagtggtttctctttgtaactcttcaaggcaccaaatttctaaactttctctcttctcccttgtatgtctgcttgcaaactagcaagttatttactgagcttatctctttcttgtaatagatgactaaaagcataaagtaaatgccatttctcaagctcacaggaagacctgaacaggtgctaccgatcagagtgcatttcccttccaagaagtgatccagagacttagtctccttccaccgttacaactggcttttaagtttatcatgtctgtcttcaacccagggaagcagaaagagaatagaggtttcttcacagaagtgttcatgagccttgttgcaatgcatatccatttctgctcagatatcactggctaaaccctcactcaaggaggcctacttaatatcaaaggtagtgaagttatttgtcttcaaggaagttgaaacaagttttaaatctgtatttagtgtatttcttcttcttcttcttcttttttttaacggagtttcactcttgtcacccaggctggagtgcaatggtgcaatcttggctcactgcaacctctgcctccctggttcaagtgattctcctacctcagcctcccgagtagctgggattacaggcacgtgccaccaagcccagctaatattttttatttttagtagagacgcggtttcaccatgttggccaggatggtctcaatctcttgacctcttgatccgcccgcctcggcctcccaaagtgctgggattacaggcgtgagccaccgcgcctggccaatcagtgtatttcaaagctgtgaaaaagaattgaacattgcaaccaagaaatacaaatgggtaacagaagatggtaaagacatgtttgtcaataaatagaaaacttatgatgatgactatattaggcccaaatagaatttctaaaagggaagcatatataaacaaagaatttgctttgttgtgtttggttttggtttggtttagtttaatttggatatctgtggtttggctacatagttcataaaactcccatgtcaccactctcagtaaatcatcctattctgaggattttcatctgtaggattatccatgtcagtggagaaaagataatttggtttttcatagtacaaactgaagcgtctggtaaaatgtaggtataagctcattttaatttgtaacagaagttgaggtcatttgcagaaaaatacattttcaataataattactattttaaaataatctcgattgacaagatgccaattgaatattttcttttacattttataagattaattttaattaaaattttttctcaatttaaaaggtaattttacaataatgttgctacaataatataaattaaagcaacagtttccactcagagattcttcttggcacaggtattgcccctaacagagtgaagccaacagttccattataagccattataaatcctaatatcaaacaagtttttattgctttagtaggaagaaaattattttcctaaggactttatttaattccattaggactgcatcacagccaaatcctgcttctgttccctccctcccataggtgttgatcccaagaacattccataattaacaggctggatgccgatctccgtctcaaagtcatcttcccaggaaacccaactggcaatatcccctctgtgtagagatgaggagacttaagcttagagaggttaagtggtgtacctgacattacaggtctacttaatgaaagggctgacatgaagtcaggcctagatgcactatacctctgctgttgaattgtactgctcctatctccaaccccatttggttccactccaattctacttctatttggtaaaatgtcaacgatcaaaactcaaatcctcttagcatttctgcacctctttaaaggttgagctataaaccacctaaaataactgacatctaagaattaggatcacagtgtatttttataaagtaagcattcttgtatttcaagggaaaacacaagttccgaaaatgaaacatgagggaaaataaatcacaagtgaaaaaataatcaatgaatggtgacttttggatgtaatagggcaatcaattttattcccaattgtagttatttttttcctaaaattaaacaatgatgctttattaatgatagggtgtgtacatgagtacgagtatttgtatatataatatcgtttgtgtagatatacatatattttaaaataacacacaatattttatcactggtttttacctaatttagattatgaatgaacaggatgaactattacttttttttaaagataacatcaacttgaatttttaatttgattttccttcttatatatgtcattaaaattttcaaaaaatgtagcacctataaatttctagaattacatgtaggaatagttcagatttttattgcttccacacacaactttatttcctagttttatcttaacagaaaaagctaatcctgtatactgcagacaggacagaatcaacattctattgcttgtgttttaagtttagagttttaggcttttggctcctaataggcataaaggtcttctccaaaccatgattcaggacccaagactcttttccgtttgtggttccaccaaaagtgttacttcttaagtttgatttctagaattggaacattaaatatatgtatgagtatttaaccttggaacagcacttaagtatagtaaaattttcctttcaacatagaataccaaaaagtgtgggtgaatcaaggcttacattttataagaagccaaggaaaattaataaagtttactttaacattatatacttacaaagtttcacagtacattttccttaaaatataaaatacacaaaaatacaataatacatatttcataaagattatttaactcataatagaaaatggaggtaccaaactattaaaaacttaatataatctcctttaataatagtctcttcgaaaatcagaagttccgtgataatttatactgttagtaaaatgtatgagttctcttagattgttaaatagttcaaagattttctattggcttctcacttctacattaatggcttctcagtttggaaccactgacttaggatttggatcagtaaattcagaaaattggaaaagatataaagtgaataatgggattgtaaaagtccatcacttctcttgatcattgtctgtggtgtacacaatttcagagagaatctgtcaagatattttacaaaaagaaatggagttttcttctaaagggaggtgaaatttggagctggtgagttcctagtgggtaactgtggggcaccatagtgtaatcaaatctctcccatcagttttgtatctttggatttatcatttaacctttatgagattcaggtttttactctgtaaattaaaggatatgagctcatccttctttcaattcctttccaaaacaaatattctccaattctttggttgttataatcaggtcctctacctccctatgcatcttcacttttagaatcaaaggaaagatgacccatggttttcatatttttaacatcactaaaattcagacacacccattttttttgaattaatagagactggggtaattggagcataggagccttaggttcttgtgaaatggcaagtgttaaaaatcattgtcatattttccagaagacaagatcatttactttatctataaagtgtttcctgacaggatgatttctaataaggaaacaactgagctggaacacattcttcttgaaaactaatgccaattattaaactggctcacaatgcttcctgcatgcttttattacacagatttatgaaagatctaattatctgtcaaataatgaaaaattagtcacttagagattaattaatcaatatgtgcaaatcacactggagatgataaacgttttcaggaagagaaagaatggaaactacctaatggatacttactgcttaccttggctttcagaattctcttatgacagtttcttgaacccgtacaatgaggcctctgggagtgttatggccaacagctttcaataatcatctgtaatcaattcatcgcctccaaatattttcacccacatcttagttcttttcatttctttccttcccatgtttatcatgcccttaaactaaattctgtactcatttatgccattttctggtacttacatcaattaaacataccatgtggccgtctcaggccctttacatgacaaagccagcttgactctgcctttgtcaaagccaaatcacaatcttacttattcacattgtttaaatccaccagtgtgcttaaagtgctcttggtaattagctgcataggaaaataaacagataggcaccatttcaggttaaatgtccaaaacaattatctttccaaacaatatttcagatatgtaaagttgcagaaaattcttaaatatctctcacaaactttgcaaaggcaggagcttacttagctatagaagctgaagatcactaagaaaatatcaataatccagaaaatcttcccacatccactgatgcatctttgaagtctgctatctaaagttatttctttacttttccaattaacatttcttgaatgcctaccatgtgccaagcatgattttagataattgggaattattggtgtacagaagagataaagatcccagccagcccttaagatgcttacattctagcaagagaatatggacaattaaacataaatttaataaataggtggattatataaaatattagaaggttgatgaaagatatggcagaacagagtaacagggagaagcattgtagggctgagcataatgggtatgttgccattttttttttttttttttttgagacagagttttgctcttgtcacccaggctggagtgcaatggcacaatctcggctcactgcaacctccacctcctgggttcaagcgattctcctgcctcagcctcccaagtagctaggattacagatgcctgtcaccacgcctggctaatttttgtatttttagtagagacggggcttcaccatattggccaggcttgtcttgaactcctgacctgaggaggtccacctgcctcagcctcccaaagtgttgggattacaggcatgagccactgtgcccctcctgccatattatatagattggtcagagtaggcctcattgagaagatgagatttgagcaaaaatatggataaaagaatgagttaacaaataaatcaatgtgataggatgttccaagtaaagggtatagctagagaaaaatgtaaggtaagaaaagctaatgggtatgagggatagacacaaggccagttggtagcctctgagcaagcaaaggaaatgtactataatagtaaatgaattcagagaagtagcacgtggtaagattatgtcaaatcctgaagccattttaaggactttggcttttcctttgagtgaaatggatgagaggtaagtcattgctgggtctttagtgaaggaacgtggttttatgctttaaaatattcacaatagctgctatattgagaaaagactacagggagccaaaggtagaaacagaagcctgtaaggaggctgcttcagcagtaaagctagctgtaatgttacctcggacccataggagagcattggcagtggtgataagtgcccagtttctggatgtattttagatagcagcaggagacagacaaatctttaggcagacagggatggtaaaacccaaccttcacaccaaagacagtttaaagctgaaaacccatctacaagtctcagataaatccacagaccggattgggaacccctcttcccatgtgaggtgctttcctctggttgatccccagccttcacctattttacacattcctacccttccctaattggttttttacactgttgcgcccatctttgagtggtgccttttttttagcctttttgcgtcctaacaaaccaatcagcacatacccccccattctgagcccataaaaacgctggactcagtcagagcaggggattgcccaccttcgggtggtgggggaggaactacctgactttgggtaagggggctgcccaacttgggtctccctctttgctgagagctgtttcttcactcactaaaacccttcaccttgctcacccactgactgtcagtgtaacctcattctccttggatgtgggacaaaaacttgggacctgccaaacagtgagtgtgaatagagctgtagccctgtagcactcccttcccactcaccaagcaacaggaaaagtagctgcttggctccacatgccccctttagtcaggctgtcgatggtggaactaaaagagctgttaacacacccctattcacctggagtctccaagttttcaggcaccaccatgtcccctttgtctggacattggagtcacttgtgacatgcctggtccagccacaagccccacatggagcccgcacctatgccagcaattggaacagccagctggaccccatgctcactcgctcacacatcccctcactctgcgggctgagtgcgcagtcacagtggccacaggatccaggccaggtggcaaggcaaatgcagcccaacaggctgaatgggcagggtacctcctgccacaagcccagggcgagcaaggcccaggcaggagcattgccagccacagaggtctccaactggcaaaacgcacagaaaaaaaatcctgtgtcattttgaaggcagtgtctatattatttcctgaggaactggatgtgggctatgaaaaggccgaagaaaaacggaatcaaatgtgactctcagtttcttagtctgagcaacagaaaggatgaagtgcagtgtggaagactgagactatagaaagagtttgaggtggagggagtcgaggcattgaattttcaacatgctaaacctgatatgtatattagaaaatcaagtggagatgctgaattggcaattggaatatacatatctgaagttcagatgacagatctttgctagagatgtaaataaataaatgggtaagacaaatgggtatcattacaatatagatggaatttaaagccacatgagtagataacattatcaagagaagaaatgtaaatacagacaaaaagatgatcaaagactgactacttggaccttccaaaattaagagatcgaaaagaagagaaaccagttcacaagactgaggagtaaccaataaaatgaaatagattgcaggatcctggaagccaagtgatgaaagtatagcaagaagaagagagtgtcgattataccaaatcctactgatcgattcaataagatgaagactaagaattaccacaaatgtatgttattaaataaatggcatgtagtcacagaagatatagcatattaattgcttccaattatttgtttcttggtattaattaaaatcataagagagaatttgaaagggagccagaacatattgtgtaaaaataagttatttaggctaagggaagagtatggtaaccagacctcagagtcagaaatgccactgatatttcatacacattcttctctaacaatcagaccttgggcaattcacttaatatctctaatttttatctccaaaatatgaggtgggactcctaaggtacctgcacctcaacatttccatgatttgaagataacacccatagtcctaccactcaataacattattcactcctttattttaatacacagatttcaaaataagaattgcatatgtgcagtcttagtctcttggtattttaagcaaaggaaattgagcaagaagaaatgtgactgacaaactcatgcctatttcccatcagttgttcacctttaggggacatacaacttttgagttatgattaaacattaaatgttccagggctacacatttatgcaaaaatggtagcttacttatttctttgtgaataaattgcactttctcatatgcctctagctttttgttatcaagaaaaacagccctaatatttaatctaaaatggcaaatttcatctgtgtgatactttgaatagtgaatgtgggtgcacgttcaatgtcatcatacttttattgggttaagtatttgactctcagatttctggccatcctcctcctttctttccaagaaggcaattggtagagagatgtgtgtgtgtgtggttaatgaactaccttggcaacaggaaggtcaccactgtgtccttagatcaagatattgcctgcattttggctgatcttgactatggaatagcaattcttggcaattctggacattgaatatatgaggtgtcaatgaccagcatatgggcatttatcagtgttagctgccaagataagccactgatttaatttatgatcttttctctgtcttacttaggtcagagccaaactgaccagtttggtcagagaaacctttcatgatgatttagcctcacctttactctcacgggagctgaagactcccccaaaggtctagctgtgtctcccacatagttcaaatcaatgtggtctatcctgtagcccttggctgctggaacactgtccctgccatggtcataaacaactcaatctggcaagcttccccacaggttctcagctagattgcaagttcctccatcaggaaccggtaagaaatttgggatcccattcatactatttagggactgaggtttattcaaggaagttgtgtttaagacctctctgtgccctcttgctgtctcactggattcactgcactgtggctattcccagtatcctaaaagatgacaggactaggcacagtggctcatgcctgtaaccccaacattttgagaggctgagacggaagaatcacttgaggccaggagttcaagaccagccttgtcaacatggcgagatcctctttttgagaaaaaaaaaaaattagccacgcatagtggcacacgcctgcagtccaagctactcgggaggctgaggcaggaggattgcttgagtccaggaggtcaaggttacagtgaactatgatcatgccactgcattctaacctgtggaatggagcaaggccctgtctcaaaaaaagaaaaatggtagaagcagaagctactgtactttcagtgttctcttaacatagttggagcaaggagaaagcctcccctccatatcttgacccaaaagaaacagttaattagactgataacatgcctccctacctccttctccccactggccctcataaccctcaggaatcaatggaccctgcattggttagcgccccttccctcctgtttgaaatgatcaactggaccatgtctgttctctaaatgataatggagtgagagttaaacagatttacaaaatattctcactgcacaaagtctgagcttcattactattttgttgttgtataaatcctattgtgcaagtcagagatggactttctctgcatttttgctctaacaatgttaacactcatttctaacacccactgccatggtcaggcagtggatactcagtttgataagggagaagatactgcacagagacttggaaaactgaaaaatgcctaaatgtctttcaaacattaccagtgctgcaaagaaaaggtaaaataaaataatgcacattttaagacaaaaccttatacactatcttctaaagtattcatgaaatcaggaaatgaacacttactccagataataaaagaagttccttaggaacaatcagaatgtttttcaaggatttcagtctcactaatccaatatgagttgctgactaagaacatttacatggaaaacctgtgcttactttacaggggaccagagaggaaggatatacagaccctgcgatggctgctcaggatgcaatggtaactagaaccagttctcagactgactgcaaagaacctgggttaaaatgggctggagtggttctgatgctacttctctgctggctaatgttccaggtcctatgggaagcctgtcagcagaagacgggggagcacaaaaccatgctgcaaatgatcctgtgcaacaagagctaccagcagctgcggctgggtaattattaactgggtttcgttccagctacttgaccaattatataacaaaaagaaggtggttaactagaaacaaaaatgaaatattacaaggaaatagcggaaagtcagttatctcaaaggtacttattttgaattttgtttataagatgtgccttatttaatgacattactaaggaataaatatttccttaatattttttccaataactttcaaaaactgagcattttaaaaataatctctgtatttgatggagtacttattcaaatatattagctgtttcctattaggtatattatatgttgtcttgcaaaatgcatagtaaatatagtttaaccagtcaatactgcatcaaggccattagtattgatgtcatgatttctgcaatatcgacggaatcttattggtcttagagggtgcactcatgttagtttgccctttgtttgacattccctaaactacagtgtctttttcttttattaaaaaaaattttgtttttttctatataaagtacgcaaatggctgaaaattttcaacagatggcctaccctaccccaatcccacatctagactttacaagtcaataagagacattacctgtcttaatgataatcataataataataatgaaaagacatcttcttgcttctaattttcagtaagaatggatgagaactaaagttgcctggggtagtcagataactaagttcgtgaaataaagaatcttaatttaacacaattctaaattagtaaaccctagtctacacccaaaaagttgatttcatatttctcagaatattctttatagatactttgctattttaatcatcacagagaggacttttacacttaattctcatatttaagctctagtaggaagtttgctgctgacataagcctattatatatgtcctaaataactggtccataaataatggcttgttgtgtgcttcctctcaatttaaatcagcagtgagttagtgggtcccactggaggtggcatttgttccccaggagaagagaataataacaggtctttgaagttcaagatttatgctgactctactaagagtatttgtatttgtttcaatggtatttatagcaaacagaattgataacagtagtacttttaattattttatggaaaatatggatttttactatgtgtaacaatctaatatttgtattataatattttcaaaatctcctttgaattacatcaatttgttaaagttttccaggaatttcaaaatatttctgggcaagatatggtagatgccattaatgaatgttatgatggatactttcaggagctgctggttgcaattggtaagtaataaattatttgaagcacaacagacattttatttctctataaatgctgagtggctctgattgaactaaagatgcatgagtaagctcttgatcgagtcattttcccttgaatttaattttttaaaaggacattaactccataggggaagagtacatcagctactgataaaatgcactaaactggcaacctgataactttaatgaactgatacccttccctaacagctagttcaactttcataccagaaaacacatcattctcagatattttctctttgaattggcttctcacactgttcaatccattttatctttactgacttccattcccttgtccaagagccgataaatacttaacagtatggttttcttctctttaggaggaaaaggatattttagtgaccattactaataaattttggtttaggagtaaatcctaccataaaagagatttaccaagtagtgattttcctcaggctattgtgatagtggcacacctcttgctccttcctaagtaagaaatgatatccctccatagaggacaaaacggggcgagttatccagaaaaactgcaatagaactacctgtgcaatagaactacctttgtcttgtactgtgctggtgaattgacagcacacatttcagggacgaccaaaggggatcattatgaaatatctccatcgaaggcgtagtcaagtaatcacttagatactagttgaataaatgaatattgtgattttccatccttgaatggcagaggcatacacgggcgtgagagctgacagataaaggaatttttgtagcttatctagtaaagaagtctcaagctaggcttccatgaaaacagtttgatgaaacccctaaaatagtatgcaatagatgactattaataactgtgtattttttctgaaaatgttacatttattccagaaaattctctacaaaatttaataaccatatattacatcaaaatccttcattttataaacaatgcctaaggaaactaagtaactgcctccaagcctatcagctgattagcagcaaagttatgactaaaattcataatatccgaatctcaagatagctttctttccactatagacccctgccacaaagcagtgggcataagagaggaagtggtggacattagaaatggcagaaaacatttcaactgatttattcactcagcagacatttattcagcacctactgttctagacactgacttaggcactgcagatagaacaatgaaacaacaaaaacagcaaaagttcactgccttcaaggagcttttaaggagtagtgactcaagagtgattatgaagatttcgtgtattaaaaatgaaagaaaagatgagggtataatctcacaatctaaaataattacttaaactaccagggaaatactgttatgattatttcattctggctagaaattatagcctctcatacattacctattcatgtattaatttgttaacctcttcaaataaacactactgaatgtttatgatcatcaactgacttccagcaaggtaactgttgaccaggctctaggctgtcctaccaccttagcagtttttattagataacttctagaactagtctagaccagttgtggtccatagtttccccttaagagatttcaggtctactcacaaatctataagttactaaaaatagcattcaaatagatgaacagattacatgggagctatatcaaattcaatcctacaataataataataatctataatagtgttaataacctaggtctctttgaagctctattaatttaatattcagataaagatgataaagttttcactttgggaggcagaggcgggcggatcatgaggtcaggagatcgagaccatcctggctaacacagtgaaaccccgtctctactaaaaatacaaaaagttagccgggcgtggtggcgggcgcctgtagtcccagctactcgggaggctgaggcaggagaatggcgtgaacccgggaggcggagcttgcagtgagccgagattacgccactggactccagcctgggcgacagaacgagactccgtctcaaaaaaaaaaaaaaaaagaagatgataaagttttcttcattaggctacatgaaggaactaacaagagttccaacagatagaaatagaccaagtgaaaatctgcatgactcattataatgttgttgctttatatttttttcctgtggcttatagtgttaccattattctaagtgttgaccttacaatacaatgtaagaattgtaacaggaaaagtgttattgtttctcaaattctgacgaaaatatatgttttcactctcaatgtttcttcttctctctctgatttctcctagttctctgtgttcgagacaaaccagcctattttgcttatagattatatagtgcaattcatgtaagtaagacatatatttttaaaatttctccagaaattgtgtctgttttctcaaaggattaattttacttccatcatttaaatgttcattaccatttttgaacttgtatgtacaaagaaaatacacccaagtgagaaaaactggtttagacaccaaaaataagacatatcagataaaaataatgttctgctttctgtatcaaatttagggaaccatatttggggtgtatctccctgtgcactttagagattatttaatatctgcagaaactggtaaattcaaatgtttttgtatgtttccaaagacccccacatcagacttatgcaagtacaaaacatatggcattaagcagaaaatgtcaaaatattacaaactctcagcaagcaattgccacgttcgtgaagtttcaatacacgaaattatgtcaatggatatttttgaacattgtgctattttcaaaaagtatttaaagtgataactagaaaaccataaactctaaatctatttttgtaattaaatgggaatgtttttcatacttcagtgtgttattcagtcgcacatactttggagcattaattttttttttttttttttttttttttttttgagatggagtcttgctctgctgcccaggctggagtgcagtggcgcgatctcggctcactgcaagctctgcctcccgggttcacgccattctcctgcctcagcctcccaagtagctgggactacaggtacccgccaccacacccggctaattttgttttgtgtttttagtagagacggggtttcactgtgttacccaggatggtctcgatttcctgacttcgtgatccgcccgcctcggcctcccaaagtgccgggattacaggcgtgagccaccgcgcccggcctggagcgttcatttttttaaaaaacaaacacttaagtgcatcatcacataatgcactccttatccatatctacatgaaacaaaaaaagaaagtctcggccgcgcgcagtggctcatgcctgtaatcccagcactttgggaggccgaggcgggtggatcacgaggtcaggagatctagactgtcctggctaacacggtaaaaccccgtctctactaaaaatacaaaaaattagccgggcgtggttgcaggcatctgtagttccagctactcgggaggctgaggcaggagaatggcctgaaccctggaggcggagcttgcgtgagccgagatcgcgccactgcactccggcctggcgacagagcgagacaccgtctcggaaaaaaaaaaaaaaaaaaaagaaaaaagaaaagaaaaagaaagtctcatagagataattatatacatgtcgtagccttgaaaactcaaagaaaacgattaaaaataatccaataatacagtaattttaatcatcagttttatcctcaaggtaaatttaacagatatacttcttaaaagtagccagcatgctgggaaaatatgttaatagtcaggagtatgttattatatatcttctgcagtgtattttctcatttatgcaaaggaagaacctggataaccccagaacacaaaaggaagatcaatgctcacagtcttgcttctctcctattctattttctaggagaaacagttgatttggttaaacatttatttgaaatagtgtatttggaaatgctataggatgatttcaattgtttccttctcaaagaaccaaccactacaacaacagtatgaagcttcacttgtgaatgattatgggaaaataactacaattaccttgattccaattatgcacaaattcaaggctacttattctaatagtacatgaaaactgtatttttgctgtgtatgtgttataaggcaataggaagatatgcgtattcacaaatggtttgtaggtacggagaaggattgtatattcaagtaatgtaatttttgatacctgaagacctcaaatgtcaaatgtttgtcaaaaagctgctttaatcacccctgaaccaaagatatattctgtgttctcctccagtgaactctaaagtgaacgatctacattttaagtttgaatacttgttagatcattcattttaaccacctcaaattatgaaaagtttattagtaatatacattcaaaacattgtcttcaaaaatcagattctgttttctggccactagatgtcacgattactctgtttggaaagacaatttgaaactgatttgttagggtgcagtatttctggggctagcatacagacattgattttgtatttttctgcatttgaatttaaaccggcaaatatttgaatcacctagaattctaattttttataatttatcaatgatgacaagaaaataaaattaaaatgttactgctgtcttagacaaatcaatgtccatctgacagagctgagaatgtcttcccctccaaggaagaattcttaccaggaaggaccacaggatcagatttgcagtttataatgcagtgtgagtgggacggtgtgaaggttaacaaggctagaaagggggagcaactattgcagaatcagggtgaaatgataagggtcagagtcaaggtcgtggcactggaatagagagcacaaggcattcagaaaatagaagagaataattcactgtcagcatgcggtaagggagagggagaagtgacagaaatgactcaggatctgaaccacagcctgtgtggccagtgatgccagtgttggaagaactcaggaagaagagaaaatgactacagaaaaggggtgtgtccacttgggacagactgacttttaggatgctgtcttctcatttctcccacttttctgtatcttttaggactttggtttccataataaaactgtaatcaggattctcattgccagaagtgaaatagacctgctgaccataaggaaacgatacaaagagcgatatggaaaatccctatttcatgatatcagagtaagtttccgacacatgatttatttggacccacattttctcctttttgaaactgagataaaagttctcattcaaataacttcatggcagactctaaaaagttaactattcagacagggataacctagtttttttcctctacacagtctttagaacatcggcaggtgctaacttagaaaaccctttacctcagctgggcgtggtggctaatgcctgtaatcccagcactttgggaggctgaggcaggcagatcacgaggtcaggagatccagaccaacctggctaacacggtgaaaccccgtctctactaaaaatacaaaaaattagccaggtgtggtggcacacgcctgtagtcccagctacccgggaggctgaggcaggagaatcgcttgaacccgggaggcggagcttgcagtgagctgagattgcgccactgcactccagcctgggcaacagagtgagactccatctcaaaaaaagaaaaagaaaaaaaaaagagaaccctttacctcagcgacagaacttattcctctttgatgtgttttacccagaagcattgatgcagtcatgcaaaatattcattctctataattgtgcttaaagagctaaattctgaagtatgatcaggctcaggaaaaatatatattgcaaaaggctgcattacttttgaagaggtttcttaaatcagttgagctgtcctctcatattgtcatagaaggcagggcagtcagtcaaatatcataaactgctaattcggagggacttaatgttcctagctatatacaactctacatatccttatccctttagcccttgaagggcaaaggagcaatgattcagtactgaacaagccagtgttttcattctgatacttttaaacttcatgcattttgatacaacctaacaaagaatcctcagaatatataggaccatttactaactgagagcctagtggaaaataaaaatgcttggcactgtgttcaaaaaagtttcaagaatttcaggatggggagagcagagcattaaaccaagccaagcacagggacataagaatagaactgaacttatattttgtgcagaactaaaagctattaccttgttcacgttgttttcatctgaaatttgtaattccaagaagcagtgttttagtttattgaaagagtaatctagaagcaatctaaagcccaagagatcacataatacagaagactttgtaggcctctggagagctgaaatggtttctaagaggaagagttgatggagcagttaagagaaatcttattccttcatctttgataaaactctcctacagccactttcaaaactctaaactcttttagtgatgagaaatgcatggcataattcattttctaaatgaatacattagttcttaggcacttattataattaatcacaaccgactcaaagtctgctaatatgaaaatgtaattaatgtaactttgctatgtacatttaaagtactgaattatcattacatgactttgtgccaaagcaccttaatatgaaagttgatacttaacaaagaaacattttataatatttatttactactatcattgattttggaaaatatagaaattatagaagaccattacaagaaaattaaaacctccctaattttctacagaaaatcattaataaacttttattctgctatggtgtgcatgtttgtgtctcctgaaaatgtatctgctgaaattctaaccccaaagaagtgatgatactaggaggtggggtctttgtgaggtgattaggtcatgaacgtggagcccatgaatgggattaatgtccttataaaataggccaaagagaacacctttgtcccttctgccatgtgagcttagaatgagaagaaggctgtctacgagagacaggcactcagcaggcaccacatctgcttgatcttggccttgccagcctctagagctgttagaaataaattcctattgtttataagtcacccagtttatggtacttttgtcacagctgcctgaacacactaagacaggtactttcagtcattttctaaagctatataaataataatatgttttgctatgtaaaagagtatttttattgaatcatggtattctgctgtataagctataaagtacacaaactacctcacattattatacattgcttctcagtttttcactattatacataatattatggtgtatatatttttagcacaaaactttgtgcttatcaatgattgataataactttcttaatatatatttcttgaggtagaattactacattaataattataaatatttttaaatcttttgagacatattaatttgttctccacattctacattcatttataacaataataataataacattagggtacatcttcctaaagttgaggagaatatttaattctaaggcaagttcttataaatacacattcaggttcaaccgactttatgtaaaccacatactactgactgtaaccagagcattattcttcaacaactttcattgggagcagtacttagggcatgttaaacctttagatgagaaaagtaaataagtttagaaaggctaatggtccatggctctttcatagtgcagtccagaggaattatgcttcctttttagaactattatgatattttatttcaaatatattatatttttcttttcagaattttgcttcagggcattataagaaagcactgcttgccatctgtgctggtgatgctgaggactactaaaatgaagaggacttggagtactgtgcactcctctttctagacacttccaaatagagattttctcacaaatttgtactgttcatggcactattaacaaaactatacaatcatattttctcttctatctttgaaattattctaagccaaagaaaactatgaatgaaagtatatgatactgaatttgcctactatcctgaatttgcctactatctaatcagcaattaaataaattgtgcatgatggaataatagaaaaattgcattggaatagattttatttaaatgtgaaccatcaacaaccta

SEQ ID NO: 53 - DNA, 54920 bp, Homo sapiens
  source 1..54920: mol_type = genomic DNA
actaaccgacgcacacggggctggagaggacttaggaaatgcccacccctgcaggagggcgaatgcggctctgcgcggcactgggcgccgcaggggttaggggcggcagagggacctccggagcccgagacttcctggagcagctccgcagccggaaggctgctgctcctcgcgggcccgccgtgcccagtcctcatcttgggggcggggccgcgctcaggccccgcccctcccttgcactgcctctggcacctggggcagccgcgcccgcggagttttccgcccggcgctgacggctgctgcgcccgcggctccccagtgccccgagtgccccgcgggccccgcgagcgggagtgggacccagcccctaggcagaacccaggcgccgcgcccgggacgcccgcggagagagccactcccgcccacgtcccatttcgcccctcgcgtccggagtccccgtggccaggtgagtgagggtcccgagccggctgggggcctgggaccaggcggcggcagtgcaccgcggcgccgcgggtgaggcccggggctgcctggcgcccagcccagcgcggccctgcggcttcctggttgcactacaggcgtgggggtggggggcaggggagggcgtcggcgggtcgcgggcgggccgtgtcggcctggcagccccctagatcagcctcggcgtctggggctgctccctcatgtgtggtcggggtgcactcgccgtccccccgggctcaggggtcggggtctcagtctgggcctgggtagggccaggggccgtgaccctgggcgcaggaggcaacgggtggcgggaggggtgccggaggcccggccccgcagccctgcggagccctccagggtgcgcgcgcccttctaggcgaggcttggggagattaagcagagaaggctatcttcaggaactttcctccgaaactgggagcacgcacattcctgggagctgctaccattgcagtttatttgtaaggaactctccccagtgtttgagggaatgcgggagccatcccaggtgctgtgcgtgccttcgccccttccccaaccttgatccccagtttcaggaagggattcctggacttgtatctcccatgggtgcaggccaggcccttaagacttaggtaaaatggtctgttggtttaaaggagacacgcgaagtttgttacctagagactttggaggggaaaagttaagccagccagtgctagcccaagctggaaacagtcagcccggggcatttctgtctctgccctccaatccttgacctctctgtagagattcggcgtttgtggtagctctcccctctgttctctgcgctgggcatggagtggagctgtgaggccgagcccctgccctgccctgccctgccctgcccacgcaacagggactaggtttgcagggcagggcctggtatgctcacccttcactggctctcattgctttcctcattccttttatgcggcagtcaattgttggggattccaggggattaacagggcccctttcctcaaggcattctttgtgctgcaaggtgttccctgataagagaggccaggtgaggtgccagggcagtttgttgccctggcattgggtgcccactacttcaggctcctgcataccttgctatcttttctttgactattgtctgtgctttggtttttcatctgtaaaatgggggtaatagtaatccctgcctcacaggcttgtgagattcagtgcattcatttatttaataacaatacagagctcaggtacggaccagtcagaacaggtggtgactgctgcaccacacttgtgtatcccagatgggtgtcacccacattagccataaagtgtgtgaggcaggcctgggtcataaataatcaggtgtaagggtcaataaatagtagcagtggaaggttcagctaaagttgaaatgcacttctcctgaaccgtctttctggcttagctcatgctaagctcatgctctctgtcttactggaatgccctccctcccctgtctggcctagcattctccaccctcctgggagccatccgggtgcctgctcccagcaggagggacgggatatgctctgagctcactcagcccttctggcactgactcggttctcatctctcgccttgcatagtatttgtgtggcggtgtggcttatcgctgccctgtcctctgactctggagggtgggggctgtttctgacttacctcttggtggcagcactcaggatgggccttgcctaatgtaggtgctcagaaaattagttgtcgttagttgaacaacagagacagcacagggaagtggtttccctgtggttaaaatataggaccttgaaggctgggtttggatagagaaacgtggggagggtgagatggagatgaattgggactaagaggtgggagtggaagcctcacctgacgcctttatgcatgatactatagaaagggcccaccctgggtggatgtgtctagaaggccaggatcgattagtgatgcctagttcacgtgattggggaggtgatgtgtggcttgggatgacaggagtgggagttgagacagaataggttagtgtgggttcttcttggaaattgtagaatagagaaaagaaactggtgtgggcaggagctgaatgtggaaccaaaatgcatgctgaatgctggaacatcagaggtcctgggacctttctggtgcaccccctccttcctcctggattcacccctcttcttctgctgtctttttttttttttttttttttgagacagatttcgccctgtcacccaggctggagtgcagtgatgcaatcttggctcactgcaacctccgctccctgggtttaaatgattctcctcccttggcctcccgagtagctgggattacaggcatgcaccaccatgcccggctaatttttgtatttttagtagagacggggcttcaccatgttggccaggctggtcttgaactcctgacctcaggtgatctgcctgcctcagtctcccaaagtgctgggattacaggcatgagtcaccgtgcccggcctcctctctcttcttagccactgttttcccccgtaagcctgaagcagttcctggcacttgttcccatggggaagcgtctgtgtaagggtatgcttcaccagcactgccaaggaagtagacttttcactttctctggatttttctctgcaacaccctctgatcccattgcccccagaatagtaggaattttgagtgatacctagataggaaagctcttaggattaatgaagaaactgagattttcttggtgggagtttgtgcttttaaagggagttgttgcaattcaatggaactctgtaataaccactgaaactgttacacattaggcttactgaccctatctcctataacccatgaaataaagacctgatagtcacatagttgtttgctatttgggaggatcctaaaagtacagcctgaacagtgacccaaaccacagctggccttgcccatgctgatgtgaggaaggaatgggtgggggcaactaagaaattgggggacagagttctctgtgctaggtatcctaggacaagccacccagccacacagagaccccccgcttcccccccacagaacagttctggatgataaaatgcctgcctggaatggagaatcagatgagaagatgtttgcaaaggggtttgagatcagttagcgggtggtgatgacaatgttgataccgtgggtgtgtgactgccaggagctgtgaagcagagggtggagtgtgcggtggtcaaagcctggttctgggatctctagctttccaggggcttaggctccgccttagcagaaaagaaggaaaggaaattgagaaggaagtcaggtgtcccctgcccctcacacttggggatggctgacttggaggacatgagatgggggaaatctgagtgagggcagagaagagaaatgtggaggctgctcacagggaggctagggagcatatggcatatccagcctggggagtggcaccactgggggaaagggtgcgtgtgacagtggggaaggagtggtgataacagatgtgagcttgctgtgtccactaaaaaggtcacggctatttttaggaagtaggtgacaaggcatgttcctgtagaactgcttattactgagaacccactgttggcctcgccctgcgtggtgtgcttaaaaggagagaccgcccccactcaccctagagtcatccacctggtgtccctgagacatgggacactggatgaggaccaggtttggaggatgaagaagatcatgtatttggttttggacatgttgtgtttgaggtgtctttgagataccaaataagctggtgggtctggggctcaggaggcgtcttggctagacagacatttgtctaggttgtgtttgtatttgaagtcatgggcacagcgagattgaagaactcacctcgaacagctgagtaaaggaagatgagcctataaaggacccagaaaaagagcgacctgagaggggcccagaaagccaggacagagttgtatcccaggggccagggtgagtctgcttcgtgggatggagtggtcagcttggcatcgcggctgtggtgagtgatatggaggagatgtggctgccttcactgctttggtgggatgatgtgagcagaagcgaggttggagtgaatgggtgaggagtagcaggacgtgaggatctgatgatagacaggctctgaaatgttggctttgaaggcgaagaggacgtcgttgagggagtgtttgattctgttgcctcgatttaccctcctgctccctttccaatcccagaagggaacatgtggatggcctgccactgacatccctccccacggcgctccgtgctcaggcagacctaggtacctgcaagggtttgcttctttcacaaagtggattcattctcatgaatgaatgaatgagtgaatgaagcatgttgcccaggttggtctcaaagccctggcctcaagcaatccccccgccccgcctcagcctcccaaagtgctgggattacaggagtgaaccactgcacctggctggtattaaattttctttgtggccaactgcatgataaatattaacatgtttcatgggcgtgaaaggagaaaataggtcctctgcgggacgctgactttagatagatctcttaacttcagttacccttatatccctgcttgcctggctgtcagattctgagaggtataacaaaaactctcactgtagttttttaaagtccagctctacttatatttgtgggagttctagccttttgagtttggctttcgtgtttcatgtatataggcttatcaagctgatcttcctacctgtcatttgctggttatttaatgcctttggtctttggtcttaaattccatattgtctgtgttttaggagaatacatggccaaggatctgggagaatctcttttctttacagtcttaaaattaataaataagtgcattttataagataataagtgaaaggctcagaaatttaaatgcaggcatcagaggacattcaagccatgcccctttagcttctgttcaggctcacatggagcggttagtaatcaggtctcactgatgaccatgagctccctgtccttggctgtcctaatggttcccatgatagccagatttttaggaggggtggataaaatgagatttgcgtgcaaactcctgggacgttgcctgggaacctcttctctcactttgcaattcctgccccttcctgtaggtccaagaagcggactgctctgcctctcatttacgcatttccttcctcattccagacagcaagatgagtttttgacagagtagccagtacaaacacttctcagggccagaagtcagaaagacgcgggccccaagtcataagctcatctctgtgcttgtgttttaagccacataaactgtctcagcgggctggactaggctatgccttgttgtaccctgagatcctagtgagtagttctccaagtactgtgtttacagataaaggcaaatgccagagagaaatggctggaaaaaccccttggcttgctaaggcaggattatcgaaaagtcttcaacatatatgtttttaaattttacatattttttcatttttatttattttgagaccagactaatttttgtatttttggtagagatggggttttgccatgttgcccaggctggtctcaaactcctgggctcaagtaatctgcccacctcagcttcccaaagtgctgggattacggacatgagccactgcacccagccaaccactgtgcccagcctatttttactattaatatttccacctctgtttttctttgcatttatttggtatgtctttgcccaacccttagttttaaatatttctttctcacttaaaaaagtttatcttggctgggcgcggtagctcacgcctgtaatcccagcactttaggaggccgaggcgggcagatcacgaggtcaggagatagagaccatcctggctaacacggtgaaatcccgcctctactaaaaatataaaaaattatccaggcgtggtagcgggcgcctatagtcccagctactcgggaggctgaggcaggagaatggcatgaacccgggaggcggagcttgcagtggagccgagatcgtgccactgcactccagcctggacgacagatcaagacttggtctcaaaaaaaaaaaaaaaaaaagtttatcttgaagatggaatcttcgtaaataaaatttgtttctcttataatcagaacgtggttgagggtggatggaggttgacagaaggcaatgataacagcaacaaacctaattgcatggtttctgtctttggtagaggaattctgactgttgacataccagatatacttgattttattctttgcatcttgcttattacttattatacttgcatgcattcctttcctgatttttgctgttgggttaagtttctcatcgtcatcttccccacgccacctgtattacgtttcaggtttggttgtgaatgaagagaggagccccgtctctctctctctctctctctcactcactctctcactctttcttgaaaaatcagggtcgaggttaagtgtgtgttccatgagattgtcttggcaccaggctccttatggactgttgtccctagcattctcaagggctgtggttttcaaacttgagcatgtataagaacaatctggaaggcttgttaaagcatagattcttggactgcaccctgaatcattctaatttaggaggtctgtgatgggacctgagcacgttaattgcttacaggctcccatattgtataatgccgccgggccacatgttgggtagcaccgtctaggtgcctcccttaactgcatggcccaagacagctcactttcacatccccatggcaggccctcctagctgctaggggtctggaaagcagtccttagtgggggctgctgtgtgccaggctatggtgtgttctgttactaaagcaagagagaacagatggttgaggaggacaatcagaagtttctggaacaccacccactgctctcctgaatttgaaactactactatgcttatcagtcttgctgttggctaagcctgtgttcctcaggttaggaagtgggaatggtttctcatgacagtggcaagcccgcaggcagtgcaagcaaggcagcttctgttcctgtgggctggtgcacaagctggcaagctgctgtggctttgctgatgccccgagagtcatctgctgctcccagccgtcaggtctggcatccgcatactccattgctgcagccaccaccagatcttccagaccccatgggatcgaggggccccctccaagacccagtgggataggggttatttttttttttttgagacggagtctcactctgtcgcccaggctggagtgcagtggcatgatctcggctcactgcaagctctgcctcctgggttcacgccattctcctgcctcagactcacaagtagctgggactacaggcgcccgccactgcgctttgctaattttttttgtatttttagtagagacggggtttcaccatgttagccaggatggtctcgatctcctgacctcgtgatcctcccgcctcggcctcccaaaatgctgggattacaggtgtgagccaccgcgcccggccaggggttatttttttgtgctacctcctcccaacttcccttcttcaaccccaaatatgacacctaggtgactgtttctaggagagtttgagggcagaggctatttgaaccctgaactgaggtgggggtgatgttcggtctccgtggctggtaatatccttgagagatcagagcagtggttgccaacccccattctctgttgtcatcacacatagggaggggatctggagagaaacagggtcataaggctcctatggagtggctggtacttttctgagtggcttgattatatgggacattatttgggaggcagtagtaactttcttctctttccggggtttaacctttgtatttctcaagtccattctccagcctgagaaggtgtgatggagcccagaaatacgttgagtggttggggaccagcctggttcataatgcactggcctggaaatccagagatgtggttctagtcattgtcctgcccccagccagctctgagacctcaggcagagtctttctgctctctgggtctcagctcccacctcaaataaaataaacaggttgaatgaaatgatttcatgaaggccctttccagctccagtattttaggattcttatgtaatccaaatgctagtgcactgggaattgactttatcttgaagaagtgtctttcagaacctgcttgctcaagttcagccccttggtgaggctccggacgctgccactctcccagcctgccttgtctggagtttctccaggctgagctgccccaggtgccagccctcagaggggaggtctgaggtgcagcctggctaatgattaacatacgctacagctattttagttcctggcatgtgggtggggagttgaatgcttaacagcacctgtgtaggctttttgtttagtgcctgggaaaatatggtcagggttggtggagtgctgccctgaggctggctggctggcttcggtgacttaatggcacctgtgaccagcaagggcaggacattggggctctggagtgcacgcccagggcccccacccccttctcagtagagctggagatgttcatactcccactcacatcacttaaggtcctgccttgaggtgggggagagaggggaatgtcctagatgtgtcctccctgcccccagaattcctggggcctacgtaatagaggctaccgaaacaggtgccacccagagagtgaaagaaatgagtcagagtccaccggggttcctgccagtattcagtatgtgtcaagggcctcacagtgccagccctgtggcaggtggtggtgggggacaggaagagaggcctgtcctacagcctgtagcactgatgctctcatggggaggcctagaaaaaaagtgtctggctctggcacttgggtgtgtgacctttgcatgtcaagagtcagctcagccttcgttcccttgcttataaaatgaggatgataatacctatccaataggagcattgtggaggttaatgaggtaatatatagggatgtaatatatgtatctatcctaggagttagaaaaaggagagcttattagaacattagagaacatggaaaacattttaggacaagtgctgtgagagttccaagaagagtgagcattgtggataggagatcagggtgggcttcctgaaagagatatggtatggtttggctgtgtccccacccaaatctcgaattccctcgtgttgtagaagagacttggtgggaggtaactgaatggggcaggtctttcctgtgctattctcgtgatagtgaataagtctcacaagatctgatgcttttataaagggaaatttccctgcacaaactctcttctcttgtctgctgccatgtgagacgtgcctttcaccttcagccatgattgtgaggcctccccagccacgtggaactgtgagtccattaaacctctttcttttgtaaattgcccagtcttggttatgtctttatcagcagtgtgaaaatggactaatacaaggtggaacttcatctggactcagggaaggccaggagacaggaggtcagaccagctagagggaccacctaagcagaggtgtcctgaaaagggaaagtgctgagctgggctgggctaaggacatgcattttttgtgcttctctccatcatgcatgtccctgaggtaccttctgttttcatgctgttcctcagtggcccagtgtgagtgactcttggctccagactgcttgacacagcttaggatgccagctgcagaagggtcagcccattcccaagtgaaggtgttttctcctccagagtgagctgcaggtccttgaacttccagttgcatgcggctgactggggacattgtcaccatctgaagagcagaccttgataagggatatttggaaaggtttcctgaggcttctaggtagagcaggggtgctcagccatttggagctggaatatacactctgttaagtctcccaggcttgaaggggctgggcttccagagtggtttgaacaggccccgaggactggctgatgggcatcagggcctttccgggagaggctgggggacacactgctgccatcacactcttcagtcttcttcgcctctcttcctcagcctgtggtgagagacgggtctgtgccggccattcataaggagatgagatggctcataacacaccaactggaagggccctggtaaacctctactcctgtgatcacaaatgcagattcctgcaaggacagcccggcagctgaaggagggagggaggtgcgcagctgttgccagccctagccgagtgtcaccatgcagaaatatggggcccttgttgccagagctcctgttttaatatttttgaaggatttaagccagagtctcccttttgcagccctttcctccctccaatgaaataatgctattgagctccaaaaccttcaggagccccaggttctgggaggcagcatgcaaaccactgaggccctgcaggcgcactcattgaaaataggtgaggtagacgaggctgggagggcttagatttgccaaggcccctcagagagaagccagtttctcagacgcccctatgctccactgccagggaacacattttctgaattctttgtcttccccccccgactcttcctaggagtggctcttaaatattgtagtgtgtgtttccctggaagtgcgctattgtgtttatctcgctagctagagggaaagcatgatgcaggccaggactttatttttttcttccctatcctagggggtgtagcccagcccctggtgcctccataaacccaggtgggattgctgtgaagctaatgaagtggaagcttcaggtccccggacttgtagcaccctagtgaggggccgtgggaggggcactagcagtgagttcacagagtcatatggtttataacatttgcaaaaaactaagattttttgtattctttgtcctgaagagggttcctaaaattgtataagcttcaggccccacaaaacctggacctactgcagatgttggtaccagtctcacagactggctgctagtgttttattttaactttcccctaaaaaatatatgcctgttttttcagaaagcagttgaagaatatagttcaccaggctggtcaacatggcgaaaccctgtctctactaaaaatacagaaattagctgggcgtggtggcgcatgcctataatcccagctacttgggaggctgaggctgcagtgagtcgagattgcaccactgcattccagcctgggtgacagagcaagagacttcttcaaaaaaataaaaaagaagaagaatgtagtaatattctgtctttttttttttttttttgagacagagtctccctctgttgcccaagctggagtgcagtggcacgatcttggctcactgcagccccagcctcccgagtaggtgggagtataggcatgcgccaccacgccagactactttctgtatttttagtagagacggggttttgacatgtttgccaggctggtctcgaactcctggcctcaagtgatctgcctgcctcagcctcccaaagtgctgggattacagatgtgagccattgcgcctggcagaagtaatgttctctttctaaagttagatgataaaggatgcttattttattgtgctttataattcatatatatgttgtatttattgctatattgtaaaaatattttataataatacacgaaaaaagccaaatatgttgatccaaaaggcttataatgaagccagcagtcccctgacacatccttcctctttccctttctccagagttaatcatttttaactatttttaattaataggcttatatgactgtttcttaatttatcagttttgaaatatgttgacttcctgcttggtagattaggaaccaatacatacatcaatatttaatgtatgcattattgtgaccataaattgtattgttcgatgctgtgcaagtaatgtgccgtggtcacacattaggagtacaatccttcctgtcccaatattcctcaggtggatgctttccctccttgggggcctgattttctgtgtatctattgttccaaactggtctggttgctccgcaggcctgctgctcagctgttgtcccgggacttctttttacagtcttctgtgttagattctcctattcctagatcctatatattttattttctttattttccttatttatgtctcattttgctgaaatcatccagaagttcctaagaaaagtgcatgggaggtagattttgttttgttttttgtttttgaagcttgtgtgcctgcaaatatctctattcctccctaatggatagaaatatccattccaaatatctctatccagtagtggataatttagctggctatagaattataagctgaaaataatttcctttctgaacactgaacacattattctgttatcttctagtttctagtgtggctgttgaagtccagtgtccttccagttcccctgaaaaggacccttgttctttcttttctaaagttttagtatcttctgcctcttctcttctcaaatttcacaatgattgctttgctgatctttttgctttgtggatataacattttctcttccgtctctaaggatattattgattatatttttgtcctctatttctcatcattgtctgtttctttggttctcttctatctctgaggatattattgattatatttttgtcctctacttctcatcgttgtctgtttctttggttccttttcttctgttttggtctctccctttcttggtgtagactttctcagatgtcctgtgaccctttgctgtctatatgaagagggagaccataaaaatctgattagagtgcataggtgaaatgtacaggaggggcaggattttatcacatctcttcccccttcggtgtgtttcctggaaggcagttattccccaatattgcaaaattaatctctcctcagcgctggtcttcccactgtacctgctgttgcctcgggcaggaagcagcaacccaggcttgaactcccatgggctgcccccgtgatggaacaaaaagaatcatcctagagaactgggcctgagtccgccagcagctctgaggacaggaagcctctctacccaccctgccctggggacgatgagctctagcctgggagtgggggattcagcaccagccctcttagggtcttgctgtatcaccttggcatgccacaaccctctctctggttgtcagtgtgaccatttgtgaaatggggtgaggtggggtcggtgggagtgaactgagtcgtctctgaggtgctgagctggcctctggcatccggttgtgaggtcctggctgatggggtgtgatggccctgcctgtgcaaatccgactgggcaaatgctgactgggcatgcgtagcctggccacacggaagccactgagggcccaagtcccctggtgactcatgttgattggtaattcaagttagcacacctgtgccgagcctgttcccgacacatgggagaggcgagcacctggttcctccttgtgccgttggaaagggttttttttgtagtcttggtggtttaatatttcccttgttgaagaaagctggctgagttaggtagacatgttcacagagctcttatgcaaagagaacagaggcctttggaaagagaatgccatagaaggatctggaaggaaagagaaggaatggtcactgtatatattagttttctttaaagttttttttgttgttgtttgtttttgttttttgagacagagtctcactctgtcacccaggccggagtgcagtagcacaatctcggctcactgcaacctgtagctcctgggtttaagcaattcctgagtagctgggactacaggcacgtgccaccatgcctggctaatttttgaattttaattttattttattttgagacagaggtttgctctttttgcccaggctggagtgcaatggcatgatctcggctcactgcagcctccacctcccgggttcaagtaattctcctgcctcagcctctcgagtagctgggattgcaggtgcatgccaccacacccagctaattttgtatttttagtagagatggggttttgccatgttggccaggctggtctcaagctcctgacctcaggtgatccgcctgcctcagcctcccagagtgcttggattataggcatgagtctctgtgcctggccaatttttgtatttttagtagagacagggtctcactatgttgcccaggctggtctcaaactcctggcctcatgcagtccgcccaccttggccttccaaagtgctggggttacaggcgtgagccaccgtgcctggccaatagttttctttaaaaattttttggccaggcgtggtggctcacgcctgtaaccccagcactttgggaggccaaggcaggcggatcacgaggtcaggagatcgagaccatcttggctgacatggtgaaaccctgtctctactaaaaatacaaaaaactagctgggcgcggtggcgggcgcctgtgatcccagctactcaggaggctgaggcgggagaacggcatgaactcaggaggtggagcttgcagtgagccaagatagggctactgcagtccggcctgggcaaaagagcgagactccgtctcaaaaaaaaaaaaaaaaaaatttattgtaaattaacatttataattatgtaaatttatggagtacaaagtgatgttataatctatgaatacaatgtgaaataaagcaaactagttaatatatccatcacctcaaatagttttcaataattagttttcaattactgctgtaacaaattaccacaaacttgtggcttaaaaccatgcaactctttttgtggtaaaaatatacacaacgtaaaatttaccattttacccactgttaggtgtgcagttcagtggtgttaaatacattcacttcgttgtgcaacagtcattacgatgcatctccagaaggttctcatcttcccaaactgactctgtactcaggaaatgtaaactccccattccctcttacctgagccctggccaacagcagtctactttctgtccttaggaatttgactcctttggagacttcatataggtggaatcagaagtatttgttcttttgtgcctggcttgtttcatttagcataatgtgttgaagatttatccacattgtagcatatgtcagttttcttctgttttgaggctgaatgatattctctttttatgtggagatcttgttttgtttatccattcatccatcaatgggcacttgagttgtttccaccttttgactactgtgaatgaggctgctatgaacatgggtatacaaatgtctgttggagtccctgctttcatttcctttaggtatataggttgagtatcccaaatctgaaatgttccaaagtccgaaactttgtgagctccaacatgacgctcaaaggaagtgctcattgaagcattttggattttggatttttggattttggatacacaatggtaagtatgatgccagtattccaaaatctgaagtcatctggtctgaagaccacaatgtctgaaacattgctgatcccacacattttgaatgagaggtactcggcctgtatgcccaggagtgagattgctggatcgtatggtagttctatgtttaattttttgaggaatctccatactgttttccatagtggctgcactattttaccacatggtttttttatctttacagttttatctcagggtcttttggatctcatggtgctaaaatgaaggtgttggcagggttgtgtctttgtctggtggccctagaggtgaatgcttccttgccctttccagctttagaggccatttgagttccgtggcacttggcccttttcctccatgggtggaatccctctcatgcttggactctgtccttcttattcttccttttcatccttaacccagcaacaaaggctctctgctttgaaggacgcttctcactggattgggcccacccggataatctaggctagtctccccatttcatggcgggtaaccctaatcacctcaggacagtcccttttgccacctaaagtaacgcattcacaggtaccggggatgtctttgagggacctaatcagagaagctgatggtagctgagtttcaggctctgaaaagccctccctctacccctccccttaccagcattttcctgaggccccgggaccctaagggttggctggacactcccctcactgtgtgggctgggctggtcccctggcgggagcctgacacctgagtttagtgtgtgcccaggatctgtgacccttttctccctctcgaaatgtcagagcctggcttctttggccactaggcgtgttggtcacagagtgaagataactgtgtcctgctttacaaagcgcgttcctgttctttttacttttagtcctcatagtaatccaaggtaggtggggtacatcaggtctttgcagatagaatggaggttcggagaggttaagttgcccaggggggtcacacagcaagcagttgcgttaggaaccagaccttggctccaggctaatgcctcctagggactaagttaaaattaactgagcacctgctgtgtgctaatacctgttgtagtgctatatatatatatatatatatatatatatatgtgagaatactacattctcacagctgtgtaatgagatggatgcatttttcctcttttcacaggtgaggagaaaggctcagagtggtcaatctatatatccagggtcacacagctaacaagaggtagagctagaatggaatcattgtcactggactccaaaccctgtgtaccatcccagtggcctagcagcagtgttagaagatgatatcagagctgtgtgggctgcggtaaaactcatgcagcagaattgagaagtcccttgtgactgtcctgtgatgtttggggcccttgacgggggagtgtgggccgtgaaaagatgggggagctggtttagagtgtgtgagagagagtaattgggggtggtagaagcctgccaagaatctaggggtagacattgtgaaagccaatgtcagtgaggctcaggcccagtgtcttggagctgcagagcttccctttacctcccactgcaaaatgagggaagggtttagagaagtttctgcttccttccggcagagctgctgcaagggttgtcttgtagatagtaactaccacaggacttggggtgtggcacatccctgtgggcccaggagatctgggagaagctgggttggactttgcagtaactggagtgacctgacagctaagaggggtgggattgacagggaagcctcagccaccctgggacttgtgcccaattgacatcagctcactaccattgttttgctggtccctcctaggcgggccctggcagaagctccctctgctcaggtggtgtaactggcggtggcttccccttgcggaagtgggtaaacaaagacagagacctgtgtctcctccccgcccctgccacctgcacttataaacacaacccactgtttccctttttgggagtgtgtgagagagagagagagtgtgtgtgtgtgtgtgtgtgtgtgcacgcgcgcacatgcgcgtgcatccttaggttccgtctaaatccgttcaagctgctgtaataaaatatcatagaccgggtggcttataaacaacagaagtacattgctcacagttctggaggctggaagttgaagatgaaggtgccagcagactcagtgtctggtgagggcccactttctggttcacaaataggatagcaccttctccctgtgtccccacatggtggaaagggttgggccctctgggatctcttttataaggccatgaatcccattcatgaggactccaacctcataaccttccagaggccccgcctccaaatgtcatcacactgggagttgggatttcaataaatgaattttggggagacagaagtattcaaactatagcaggtcctggccacactttggagtcaggacttgggtggggggctttttctgtcactgccactgtgtctgttgcaagaacctcagcgtcctccaggacctgagtgcccatcacgtgctggcctgcgaggcagccagatattagcactgtgtctctgtcactttcttcctctgctgcccactttccactcctcagaaattctgaattggactcagcatttgactgagcattggctcttatgtgagcctgtttggtgtgggcaggcctcagaggtgactctgcccacaaagaggagtggcctggcttccagggaagcctgccatggaggagcgtgacggagagatctgcgtgtgacgctgtgtgctctcggtctgcgttgtatggaaagtgagttcctcctcacttgcccccatcccccttctcagcacctggtctggagaggcaggcaggaggagagaagatggccccatccatgccacacctcagtgaaaattctgaggacaggctctggtgcccgcagggttggagcttcatgcaggctgaggccctgcctctgcgggtccctctcccaggcaggtttactctccgagggtctttcatatctccctgcccggtggcctccctccaccatcagtcttgccttcgctgtcccctctactcttggagtggagcaggcccccatacacccaggcacgtggaggggatggaaagaaaacagcgccaatttcctgttggtgctttctctattgggaggctggaaaatccaacacagccatgccagtgtgctccccactcccatcctccacctgtcacactgccctgaccctccccagttccgtgtttctctcctacccccctccttcccccttcagtccccacagttctcatcctgggcattatcaaatagcccagggtcctctctttcttattttgttttggagaaacaggatgtcatgatatgttacatgatataatgggaacaaacttggtattaaactgttaatatccccattttacagatggggaaaactgaggtgcagaaaggtctcgtaaactgtcaagatcgcgttgctggtggggagcaggactaggatgtgaacctgggtagtctggcttcagagtctgtgttcttctcaccatcctccattgcctttaatgaagtactttaatgaagtacctttaatgaagtatgtaatgaagtttcatacagtgaaaccggacttagaagccaggtatcctgattctgaattccatgctatttcatcataccagtgtttctaaagctctgttcttaaaatactagtccctggggccagtgggctctgtgaggaagtatagtgtagtggtaaagtctgggctttggaagcagactgcctggctcagccattcaatagctataaccttgagcaagttacacagcctctctgtccctcagtcttcatttctgatatgagaaggataattttagtatttgcctcatagggttgttataaagttcagttccgtgtgaagcacttaacagtgcctggcacatagtaagcatttaataaatggtaactactattatggcctaattagtttgggaaatttgaggatagagttaagcaggcacttttgttacaggatttatcagagcttttattacgctgttgcaaattggcagtttcctggaaaggggatgtgtagttatagtacataactatatgtagtaagcattttctaaacttttcgggcaactaatctcttgctcttgtctgcctgtctcgctccttaaactgcgtgccttctaacttcacaacttgtaagatatgaagctggtgtcagggaacacattccgggcagcactgagctgcccatcactctatctgcttctaagtgaggctgagctaggcctgggcatcccggttagatctgagcaagacttctgggggcagtagatggtaggtgttcagaagcaaacagacttatagtgaaaatgaacaagctgtccatcagttgactgtcatgcaccaggtgggttctgctctacagaaggccaaaatgcatattgtgggagtgtgatgtccttgctgagatccttggatttataagtgtttattatgctgttccttgccctgcaggccaaatacatcctatttgatacttaaataatctcaggagccaatgaaggaagaggttataaaggagaaaattgactaactggcaaagcagaggccagtccccagaactccatccattcttccactcaagctgcatttatgaggtgcacattcagccagatgctggggtaacagtggtaaacaaggctgtgggactgcatttttgactctggaaaacatttgcagatggttggcagcatcaccactaggtagagctcagtggtcctggaagagtcctggggaggttggttttctggccctcttgtattgacaagtgccccctcaagcattccaagctcatactcttcctaaggtgaatcagcacctgagtcttttgctgatgtagaagcctgatctcaacttagagtcccagctgtattatagttatataaacacactgtctgtctgtctgtctctctctctcgtattagttatataaacacactctctgtctctctctcacacacacacacggtccctgactcaagatggttgaacttacagtttttcaactttatgatggggttacatcactttcagaagggatgtaaccagctcctccacttttgatggggttacaatgaggctacggtttttattgagtgcatgtcactcttgcaccatcataaagttgaaaaatcataagtcgaaccatcataagttggggactgctgtgttgccagcattaaatgcattttcaactcatgatggctttatttggatgtaaccctatcataagtcaaggagcatctgtatgtatttatatttaaagttcctaacatttagagatatgaacagttacagatgaaataatatatgatgtctgggatttgcttcaaaacaatacaggggtgtgggtggggttcgggatgaatcaagatgggccttgaggtgataattgttgaagctgagggatgatggtttattaaactgttctgttttatatatgtgctccataacaaaactttgtgaaaaaagtcgaccattattaatcaccgcctctgtgattaatggattaattaggattgtggctcactccatggaattccacagccacagttaggtacatggtcccctggggccagctcctgccactgaaggggtgtgtggggcagagcttgggctctatctgccttccctcgtcttcatagttatgggggaactgtgagctgatgcactgagggtttctggaaccttctggctgtgaggagtggccttggcagacccttgtttaaagcatgcttattgcactgtctccttttgcccttggaggaggggtcttcaagtaggttgccaagggcagggcccactgggaccaccagtgaagccagctcagcttggacagaagtggcacacgttttgcaatgcagcactgtgaggggatgtcaggttttgtcgtcagctgcctgcaggccaagctctaccatggaccctctccgccacacccgtgtgatgtgagcaagccatgtccctggtgtattttagctgcaaagctgaggaagttagaacatgatcccttccaatgtggacattttgtgagtctgtaagtctaggatttggggtgaaagctgaaagaggcccccttcagaaatcctgagatcccagaggaaggaaggacctcaaaaagggttgcccctggttttgcccatgggtcaagtgaggtctgggagaggaggcctggcctcaggttgctggctgagatccttttctggctgagatccttggaacaggactaccgtagtagacgtttctgcctcgtcttagaccttccatcttgagttctgggctccaggcccttgtctgcaccttgctctagcctggtgcctccctctctcctgcccagtgacctgggacgagtgcctagccactcacagggcactgtgtggaggtcgtgagccactcacatcagctcagggctaagtaagtcttcatttccccagcccatgccaggaggggcaccaggtcggaatgtgaactaagaaggaaaactccaagcaaaactctcaacacttcaccctgcgaccagatgtgtgttttttttccccacactgaccaattctctgactctaactgggtgtcctataatgcagctcaattctgaccctaactggagtcactgcagaccctataggttaaagggctcagtcccacaagactgccagatatatatttcttatatcacattatcacctgagacattacttaaccagagccgagccttctcccggagtgaagagagtttgcagatgcgtcagtttctttcctcttttaaaaaaattatgtacatatatggggaatgggaggccaagggagggagagcattaggacaaatacctaatgcatgcggggttcaaaacctaggtaacaggttgataggtgcagcaaaccaccatggcacatgtataactatgtaacaaacctgcatgttctgcacatgtatcccagaacttaaagccaaaacaaaatgtacatatatctgagcatgtataaacacatatgcatatacatttatatatttatgtaaatatatatacatgtattatacatttctgtgtgttttaaactgtacgttgaaaactgcttggtggtgacctttgtgtacaaggatagagggaagaatgcttgcttttcattttgtgtgtttctattctgtttgaatttccctacagtgtgcttgtattccttttatttgttaaataaaatttattttttagagtggttatagatttacagcaaaattaagtggaaaccacagagtttccctgtccccctgcccccacacttgcaccccccgccattagcactcccaccacagtggtatattgttacaatcagggaagcaacatcgatccacctattcattctttcctcccctgacctctggcaactactcatctttttgctgtcaccatagttgctttctccagaatatcgtagagttagaattatacagtgtgtaaccttgggtgcttccaaattgttggccattatgaataacactactgtgaatgtccatgagcaggttttgtgtgcggcagaagttttcaacttatttgggtaaataccaagagcatgattgctggatcattggtaaaactatgtttagttttgtaagaaaccaccaaactgtcttccaaagtgcctataccgctttacatccccaccagcgatgaatgaaagttcccgttgctctgtatcctcaccagcatttggtgttatcagtgttttggattttggccattctaataggtgtatagtagtatcttattgttttcatttgcaatttattaatgacatgttgagcgtcttttcatatgcttatttgccaccttatatcctctttggtgaagtgtctgttcaggtcttttgcctattttttaaatcgtaaggttttcttgttgagatttaagagttctttgtatattttggataatagtccctttatcagatatgtcttttgcatttattttctcccattctatggcttgtttttccttcctttcattttattttatttatttattttttatttttttgagacagggtttcacttccatcgcccaggctggagtgcaatggcgtgatctgggctcactgcaacctccacctcccaggctcaaatgattctcctgcctcagcctcctgagtagagtagctgggaccacagtcgcatgccatggtgctcggctaatttttttgtattttatttttgtaacgacagggtctcattatgttgcccaggctggtgtcaaacttctgagctcaaatgatctgcctgcgtcagcctcccaaagtgctgggattataggcatgggccactgtgcctggcctcatcttgtcattttaaagaatatatcagcagggattattggacctgcctggtttaaactattgtcttagttaattttgtgctgctctaacaaaatatcacagactgagtaatttataagcaatagtagcttatttggctcacagttctggaggctgagaagatcgtgaggctgcatctggcaagggccttcttgctgcttcataacatggcagaagacatcatgcgggtaagagagagcatgttatacttttgtaacaaacacactggtggtaaggagcccacttcctccataacacattaatccattcgtgagggtagagcctcttaaaagtaccgcctctcagaactgttgtattgaccattaagtttgcagcacatgaactttgggggatacatttaaacaatagcaatgatatatttaaattttatggatacaaccttatggggaaagtattttaaaaaataaattgtgtgtgtgtgtgtaaaaacaggttaaggatctaatgttaaaaaaaaaaaaaactaatatacaaatcaatattccagccaccagactggggaaggccagtggaaaatcactccatgaaagcatccactgtagtcccggtctgcttggtttgctgttaggccctgaggggcagggggtgtcactgctgtgtggcttctggcccgagatgatgtttctaggcccttgcctctcagcattaacctggtgtaggctctgttcccaaatgagccctgtgttgtctttctggggaggacagtccagagtcccaggcatggcactgacaccatccacccctcctttcccttctgtatccctgaagtcaggcaggacaccagcaaatgtgcatggcctagccttgctggtggctggagcccatatctccacctccaattgttgggtagagacacagcaaggcttcccttttggtagggggatgactgagtcggggcagtgaggctcttcttgctctggcagttgcctcctgtcccagtgtagcatttctagattcctgtgttaggggactccagctagtacccttttagagcctgtggagttgaatggtacacttacgtacacgtaacatggctttagggaacaggccattttgcagccactgagaagcacccccagatagctgctctatgcttttggcattcaccagacgctttgaggctggcttctgatgcagtgctgtcatgccagactcctgtcaactttaatagggatggcaccatgtttgagaggccgaagaagagacccagagccaacgaacaaggcatagggcttattgaggggacttacatatggggcggtccagtggcagcaggctggatggaaggaccactactatttgtaaaaagcatgcagtttgtatagcattttaatttagcatcctccttcctaaccacctccacctggcaaccttcatttaacgcagaacaaagggccttgatctcctgtatggccatggaatggcttaggggttctgatgttccttatagataaggaatggatctccaggttggccacagttcctcagctcagaactctgaacacacattcttcttagactatagggtcgttctgggtatgcttaagtgattgctgtcaggtgcatctgtcatacaactgtgggggtgcctaggtctagtctgtgtccctagagcttactattgtgaagaagagtatattcgtccattctcacacgactataaagaaatatctgaaactgggtaatttataaagaaaagaggtttaattggctcacagttctgcaggctgggcctatgccaggttgaagggcccagaatatgggagccaaggtaccagcatttttagccagctctccaagtgagggaaagcatgatgctggcatctgcttggggaggcctcaggaaacttacaatcatgtggcaggcagatcttaacctggctggagcaggaggaagagaggtgtggggaggaggcgctacacgcttttaaacaaccagatctcaccagaaccctatcatgagaacagcaccaaagggggaaatctgcccccatgatccagtcagctcccacctggccccacctccaatgctgggaattacaattcgattgtattgtaattagaaattacaatttgggcagggacacaaatccaaaccatgtcaaagagtgagatcagatgagctagagagtgtccaataccttaagggaaagagtgtttcctagagtgtggaccacagaaccagttacatcagaattactggggactggggggtatgtatgcttgtttacacttcagattcctgggcctatcccaggttagaaggcccagaatatgggggctagggcgctagcatgtttagtgagctctccaggtgattatcatgcatgatgaagcagtgtggcctgcaggcaggcagcatcagcatcacctgggagccactggaaatgcaactttttgggccctgccccagagacactgattcaaagactctggaggtggggcccagcaatctgtgttttaacaagccctataggggactgttttccagaagcaccgatttaactggagagggccccagctggatgaaatcaggtgcacagctgcaggtggatggtcgcagtgaggaaggaagggcggtatttgtgctgcagcctgccctgagaggcaggaccagaggccagaaggtccccagagacaggtttctaagaattggacccatccttaaggaggccagctgcctgctgtgtgcaggaggccctctccagtgagtccccatgtcagagggccgtgattagaagcaggcgtagagcgggggacatgccccagccatcagaattgcaccagcagtgtgaagcatgtctcttgccccatgcaaggaaaggaggagagaggcattggtcagggtgaaaggtatgattctcatggatgccagagagagagagagagagagagagcagatcttctggattatagctcactgtgttgcctctctcctggggagtgggtgctggacaggctagggagggggacccgagggccttagaagtcttgccgagcccagatatggcagccctggggtgccaggaacgacttctccaaggacagccccttgcggtagcctcttttgaaaaaatgcagaggtcacagttaccagaagactggaccatgagcagatttcttaattttcaaagaaaaggaggagaagaatgctgcttctgtgagtcagagagcagtgtgctaatcctgcagcctctagcctcctagaacatggatagcttggggggagattggtcagcgctgggagcctgtgtccacctgaaggtcacccctggctattgggctgcgtttacttttctcctgggggtaattaggcagataaacaggctctcttcagagtaaatgtgctagaaccctcacttgggcatgtggagaaatgtgtactgggtggtggcagagtgagttgggggagagctggttaaatgcctgcacccacatgatgcctagtgtttgatgttgaactggggagttctgagtatgacagttctgtagtgtccctcgttgtccctttcgtcttggttacttggcagaacacaaatgccatgcttattgcatccatggatgtaaaacaaagctgagagagagggggaagatgtttgatgttgagcagaatcccagaaggtctcaggagactggagcaatgggcagaacccaggggagaaatttcacaggagcccacataaggtctccgtggcctgaaaacccacttgtaccagtccggggaggtagggagtagcatccactggagggagatgaaggtcccgccctgcactcttcagaccatacctggggcgtttggtcctgaaaagaactaaaagataagagtggggtcaggccaggcatgtaatcccagaactttgggaggctgaggcgggcggatcatctgaggttgggagttcgagaccagcctggccaacatagtgaaactctgtctctactaaaaatacaaaaatcagcctggtgtggtggcaggtgcctcaggtgcctgtagtcccagctacttgggaggctagggcaggagaattgcttgcaccgaggaggtggaggttgcagtgagctgagattgcgccactgcactgcagcctgggtgacacagtgagactccgtctcaaaaaaaaaaaaaaaagtggggagcaggcttgaaactatttcaggcagagaatgacagagggaaaaatgaggctattctttctaagaacggaggactagaggtatatcttggggagaggggaagacccagggtcgcaggaccacagctcacagtggggtcgacctgccctgtggggccatgcagggcagagctcctagccaggaggcagattttgactcctgctgggaactcccttaaaagccaccccaagaatgagctccacgagcgccatcaaggctggcctgcaggccctccagggttaccaaggctgcctggaactgaatggaccctgtgtgtgttcttttagtcttggaagaccagccaggactttgggggccagacggctagcctcaagtgagctcagaaatctgcacctgaattgggcctttttaaaagttgtttaatggccaatacatacatgcagcagaaatgcacagggaacagatctaaaccggaagcctcattttctagccccacctttcctctcgagaggcagctagtgttagctagtttcttgtgtgtcattccaaggatgtccgtgcacgtctacactcaggaaccacttagtttgtatgtttctgggttttttattagcttagtacatacacagtactgcaccttgattaataatggtggtcattgcatctttccatatacagagctggctaaatccagaaatagctacagagtatccattgttggatctgttgtggtttatttaaccagcctcattggtggaggtttaggagttgttgcagataaggctgtagtaaaattcatgtctgtatgacatttcacacaggtgtgtgtctggggaagagacttacagaagtggagttgctgagtcaaaggtatgtcattttaagttttgatatctttgtattttatttatttatttattttggagacggagtctcgctctgtcacccaggctggagtgcagtggcataatcttggctcactgcaacttccgcctcccaggttccagccattctcctgcctcagcctcccgagtagctggtattacaggcacccaccaccacgcctggctaatttttgtatttttagtagagacagtgtttcaccatggccaggctggtctcgaactcctgacctcaggtgatctgcccacctcggcctcccaaagtgctgggattacaggcatgagccactgcgcccagccgacatctgtgtatttttaattggtgatttcctcagcacattggtgaaggtgagcatcttcagctccttttctgtaactgccagatctgttcacatcatttgacagtttctctagtggttattgatctttttcttattatattaataaaacttttttcctaagtttttttctcatctttatttttttttaatttgtctcttatgctgaaattttatttatgtcgttggtttttggggctacttctttcactgcattatttggcctggctggaatttacttggtataaggaacagggtggtatccagcttctgtttcttgggttttttccctggcctggctgtggatggagcttttggcttcatttctctgagaggaggccaggagtggagagtgtctttggtgctcaaaggtcctgcctagtggtgtctccagagaggaaggtgacagagacaccatcccggctcttcctgctcacctgtcgggcagttccttctattagaaggttcctggcctactggtcatttacatcccccagattacctcctcaccagtgaagtctgagggtttggcagagtctgggcagaagggtcaggctggggccgggacggggagggctttgtactgacagcccacccagcctcagggacaccctctctgaaggtgatgccaccggggacctcatccaccacgtgcttaggggctcagagagaccgaaaactgcaaggagtaggtccttggtccacactacagggagccaattccagctttctccaaagccatagggctttgcctacggtcacctctggacccactgacccaaacaaatgactacacccgtagggctgaaaaccaggcccaccctatggggaccggtggtaccttaaggaagttctttagcttccttaaaaacagcatgtaggctgggcacagtggctcatgcctgtaatcccagcactgtgggaggccgcagcgggcagatcacttgaggccaggagttcagaccagcctggccaacatggcgaaactccatctctactaaaaatacaaaaattagccagggatggttgcgccctcctgttggaggctgaggcacaagaatcccttgatcccaggaggcggaggttacagtgagctgagctcgcaccactgcactccagcctgggtgatagagtgagacgctgtttaaaaaataaaagtaggccaggcatggtggctcatgcctgtaatcttaacactttgggaagccgaggcaggcagatcacctgaggtcaggagttcgagaccagcctggccaacatggtgaaaccctgtctctgctaaaaatacaaaaattagccagacatgatggcgggcgcctgtaatcctagctacttgggaggctgaggcaggagaatcacttgaacccaggaggcagaggttgcagtgagccgagatcacaccattgcactccagcctgggttacagagtgagaccctgtctcaaaaaaataaaaataaataataaaaaaacttaaaaagaacagcatataccagcctcggcaacatagtaagactctcaaaaaaaaaaattagctgtgtgtggtggcacatgtctttaggaggctgaggcgggaggattacctgagcccaggaggtccaggctgcagtgagccatgattgtgccagtgcactccagtctgggtgacagagcgagaccctgtctcaaacaaacaaaacccaatatgcccagttcttcaagatagatatgaagggcagctagactcttatagttggatagcgtggctagaacagtggtcttcaaagtgagttccctggaccagtaacatcatctggaaacttgttccaaatgcaaaaactggttccactgtctcagaaactcttggtggtggagcccagcaatgtgttttaacaatcccatcaggtgattctgatatgcattgcagcgtgaaacccagtgtgtaaaaagaagccacatactcgagacgagcaggtgtgattgttgagggaccctgcaggtttcctcacatgtccgcctgccattgggtgtctctgcagactgcagcagcagctgctattagcaagagcaggcaggttgcacaatgtggctggtgtcacagcagatctgtgtccctcctcacaatttaactggcaggggacattgccaagggatccgtgttcagagggacttcgtgagagcaggtgtctcacctggcacctgtccaggctgctcttcctcccttactgacagatctgcaaatcacttacttctcttaatcagcagcctctactgcagaaacagggtgatgctgcctcatttgccctggttcttcaccctgcatcagatgaacctcctgagggccctttttgcttctaggaacgatgattccataccttaccaggtccccttgcctgatgaaccagaggttggagaatgaagagagacaggggcctctgacttcccctgttgctggagggatggcaataaggacacaggaagataaatagacagacctggagtcctgagaatgaggcagtgcgtctctacctctgaggtgggagaacaggcccagaggcgcactgcacccttgccagcagaggcaggagcaaagcttcagtgagagggcctttcaaggaaactggctcatggggagtgaatcctgtcactgtgggtggggccgggggtgtggccctggcccagaagtcaggcagcatgctggtgggtactgtttctagctggaggcaccagcaggagacagtgaactggtctgcgacaagcagggcagatgcagcagtttcttctgcagggtcccagttgtggtggtggctgccctttcaagaagctgggtcccacgggccagcaggggctctcaggcagagcctgaatgtgctttcgtcttctcttccagatctaaccatgagctaccctggctatcccccgcccccaggtggctacccaccagctgcaccaggtaagagggtctggggtggggaggagagtgaatgctgcctctgtacagtggctgggagtggagaggggagaacagtagtttcctcactcccctcctcccctcacagcacggcccagcaggggaggagaggacaacaggagtagtgggacagccagccgaggcaggggctggagaagagcatgacactaaggccatcggaggcctaggtttgaaactgcctccagaaagccctggaccaggcccagggctgggtctcttgccttactctctagtaacagtgggcaaatgctgtcactttgagactcagttttcttctccgcaaaattgcttcaaggatttctccctcattaggtggtcctggatactgatgagataggcaggcagagcgacacggtgtcctccaaagcattgctaggtgatggttgccccttaccacctctcctaccctctgctcaaggtgtgtgggtttgcagcaacaagatcccccttgccaagagaggaagtggaggcagatgctaagggtcaaaggtcactccctgttttctgcaggagctgtgggtagtcacatggagaagtcgtcttctctggccctggccccttttggtcctcaaatgagatttggtccccactgtgggaaaggaaatatgagggctcatgagaccaaggggagaaaagggtcattccaaggctggtcatcctgagggtgcctgagccgctgcccctctccccaggggactcctaggcatcattgatttctttggagctgaggtcctgtggtttgaacaccccagacctgcaggccatttaccttccctcccattcagcaggtgaagaacagactcagacctagaggtggctcagctgctgtcccagggcatgttaggggctgagctgggccactgccctctgaatgagcccaccccaggttggctggcactggcctgggttctctctctatagtagaaatcctgccatccagatcctgccactgccacctttgctagcacagctgagcagcctctgagcagcaagagaggaggaggcaggaaatttagggaaggttcttcctggagggtctggagccctggagatgaagagccgatccgaagctgccatgtagaggaaagcatctaacaggccagaggccccatgatgatgtcgaatgcccatcgggcacccagctgagccctgcaggtgttaactcagtcttcgtcacagcagtctaggcatacactcaccattagcccatttgtaagctgaggaaacaagcctaaggagggtgaaagccttgccccagggcacataccggtcctgctggtttcagagcgggcttttcacctctgtttcttcctgtcctcttgtggactggtatctgtgtttaccatgacccagccccatgtccctccagcctcttatcctgcttctccctgccttttacagacttgtaatagcaaacagccaaaccccctcccgccagtgccttcgcattactgaaatctcagagctccctatggtcacctctgtcatgggctcagcatggtgtcccacaacagtctgtccttgtctgtcctcctgctccatgatggtgaacttgggagggcagagcctgcctgggctctcccagcctccttaataccccacagagggtcttgggagtgtttggggaactccaccttcctccctgggaagaggggaaggtttcccctcctctgccagtgggatagggggagactttcctcctggtgttttcatgtggtctgtggtgtcccgaggctcgaggctcgaggctttactgggcctccctttctgaccacctgggagctctcatctctgcctttccccgtgtggtgggggactggcagggggctaaagggcttggtgttgctttcaggtggtggtccctggggaggtgctgcctaccctcctccgcccagcatgccccccatcgggctggataacgtggccacctatgcggggcagttcaaccaggactatctctcgggaatggtgagtccagctctcctgctgaggcagccctggggccacacctgcgtggccagaggaatcaaagctgctggcctctggggctccagagttgtctatgtgtgtgttgctgtggtgtgtagtgtgttgagctgtaccttagaacagggttttcatcaggcttctgccacctgctctctgcccctctctgggtctcacttttcccatctgtaaaatgaggggaaggggaccagatgatctcacaggtccctttcagccctgaggggttagggttgggaaggtggcgagggtatctgcatgagtgtgcatgcacgtgctatgtatgagtatccacattcatatacctgcatgtgcatgtgtgtacatatggagggctcttctggttaggccttggtgggtgtgtggcaggtatcttgggcagacatgctactttttaaatttgttgtttcacttttaaaataatacattttatgatttgaaaacaaacgtatgcttagtttatgatttgaaaacaaacgtatgcttagaggaaattatgcaaccaatacacaccctaatttgtgccaggcccagttctaggcactggggatatgtgaataaaacaaacaaaaatctcagccgtgctgcacttatcatctatggggaaaagacaggcagtaccttaagtcaacgatgtgatgttattgaaagtgtaggtgccataggaacaagttgaccagggtaaaggggtcaggagtgggggtggggtgatgtaaggataatgattttaagttagcagtaaggtgggtctggctgaaaagaggatgtgtgagcaaagacctgcatcaggggaaggaagtgctgtatggatgtctagggaatgccggtgccctgaggtgccaaggggtgtgaggtgctcagggacagggaggagaggccagtgtggctaaagtggaaaggcgagggggtgagatgggaaatgaagtctgggggtctagctcttgcagggtgtaggaggctatccatcctaaggatttaggtttttattcctggtgagtgcagattcacctgaacatgcctgccagaggtgtctgtgggtagcaggctgatgtgatggggatgcccccaaccctgcatatgggacccacgcaccttcttgggcagtgagctcttaaccttcacccaggtggtctgggatgggaggagcaaccatgtggagagggaaggcatctcccctgcagaaggggatgaggatctctggtttggatcgagtcgcactgttcactggctgtgtaactttgagcaagtaaactcattctgtggtctgtgaaatgggtataacggtacttcatattccacaagcggagatgctgtgaggactgacttggcttaggtatgaaaaagggtggagggacggagtgcagcagggcccattggcctcaggctctgctttgtgtccttgcaggcggccaacatgtctgggacatttggaggagccaacatgcccaacctgtaccctggggcccctggggctggctacccaccagtgccccctggcggctttgggcagcccccctctgcccagcagcctgttcctccctatgggatgtatccacccccaggaggaaacccaccctccaggatgccctcatatccgccatacccaggggcccctgtgccgggccagcccatgccaccccccggacagcagcccccaggggcctaccctgggcagccaccagtgacctaccctggtcagcctccagtgccactccctgggcagcagcagccagtgccgagctacccaggatacccggggtctgggactgtcacccccgctgtgcccccaacccaggtgagtgtcagcccactgcctcccttggtccaggcctgggccccaaaggctggagacacatggctcagtagatggggagacagggaaaggcgcaggcctccagctgcacttcttgttttaacaaatagtgtcggccgggtgcagtgactcatgcctgtaatcccagcactttgggaagctgaggtgggcagatcgcttgagcccaggagttcaagaccaacctgggcgaaatggtgaaaccctatctctactaaaaatagaaaaaaaattagctgggcatggtggtgcatacctgtaggcccagctactcgggaggctgaggtgggaggatcacctcagcccaggagacagaggttgcagtgagccgggatcatgccgctgcactcactccagcctaggtgacagagtaagacccagtttttaaaacaaaaacaaaaacaaaaaaagacaaacaaagagcgtcaccttcttgcagactccccacctctgggttgtgttgcttaaggcccaagggagctgtcctgtttctcctggtgtgatgagacgctccacatccgagttgggtcagaacacccctggcgagtactccttattcctctgtgtcatttactgcctgggctgtgtgttttgtaagaactgcccaggccacctgtctcaaggctttgtgctcaacagctgtcttcggtcccttgatatgcaccacccccgccccccccggcacagacaggttttggaggattattaaaattccctttgggtagggagaatgttggcagttcctccagggttgatcttggctcattttggagaacagttcgtgtttgcagagcctagaattcgttgtcatggttctgtggcccaaccagccagcacaggggtagtggtatgtgctcaatgactatttttagacagagggtctcctttcctccttcccttccatacccacacgttcccccaccctgtgccatcctccagcctccctcccttatcttttccctgagctgccctcttaattgtgttataaccagtttgtaccagcccctaggaagacaatccactgggagacagtttagcctggaaagttccagtttgcgggtttgtgcagctatcagggtctggaggaagtccggcagatgctagtctagagaacagtgcgagggaaccagtgctagatcaagaggtcatcaggctgccatgcacagttgtggaggctcaatacctgcatccactggaggggacacatgggctagccagccctgttaggagtacccatgtgtgctcacatgtgctgtggaggccaggcatcgatgagagaggccacagcccctgctcccgagacctgcccttcatcaggagcctgagccccagccctggaggacctgggcactgggcagattttcagcatcaggactcagctataggtgagctcccagccactggagccaggaaaaagcttcagtactagaacacaaggccagataacagtcaagttaggtagacgcggcgtaaagtcctctgcattgttgactgtggactcctttagatactccaactcttagagaaagggctgttcccagagtctaggggtggagcagccttgaatgtggggaaggcggcatgcacgacatcttacctgagactgtttgtccgagtagtttggaagccgaggcaccatcactgatgctcccggctttgaccccctgcgagatgccgaggtcctgcggaaggccatgaaaggcttcggtaagagaccctgggtggctcaaatcctactccctgccccctatttcccaggcagtttcactgtggctctgtgggctggggtagctgggggacgctgacctggccccagtggtgatagaaggtggatgtgggggtatggctagcatgcccagaacagttgaggggcccaggccagggaagtctcagctgcagagcatctcatgacccctacccgacccacccctgctgcctcttcctccagggacggatgagcaggccatcattgactgcctggggagtcgctccaacaagcagcggcagcagatcctactttccttcaagacggcttacggcaaggcgagctgcggggtgggggcgcgggacagtgaggcgtgtcctgggctcagcacagccctgctctcccctgcttttccttgggtgggcccggatctcccggatggacagtaaggagcaggagggcatttccttctgcccatccagctggtggcatcgttgggaggtgaaggatgccaccgggtgctgaggtttgctgagaggctccagacatctatccctgggttctagcccttgctctgccacatctcactgaggttgtggccacatcattttccttcccctgccctcttcatgaccaccctggggggtttagctgatgtaagagctttgcagggaaaggctgtgagtgctgcccaagtacgaggggcgtgtatgagcatattttgaacttctggggttttgaatcttagaaagataaaaattcggtaaatattgattagattcgtgttctagcccagtgcttctcaaacttcattgtgtcaccgatcccctgggcatcttggtaaaatgtggtctctgatttgggaggtttggggcagggctgagagcaggcttttctctcaggcccctgggggatgtccatgctgctgttcctcaaatctgggatatggctcttattagtcacttcctgtggattttttaaatagacttgtttttttttttgttggttgtttgtttgaatatccaatcaggatttgatcaaagatctgaaatctgaactgtcaggaaactttgagaagacaatcttggctctgatgaagaccccagtcctctttgacatttatgagataaaggaagccatcaaggtgtgtacgtgtgtgtgtgtgtgtgtgtgtgtgtgtgtgtgcgcgcgtgtgtgcgcacgcgcgcatgcgtgtggacacacagcccagaaggaggcctggatggcgtgctgtgttctagcccactcattagctgctgttgtcagtatggctcccaggccttcctgggttggagtccacatgctatagaaaagggaactccctgtgatttccccaagaggcaaatgacgcaccagtcatcatcagggaggcttaagtctctctccatcttaaagaaaagggggagctcgggtttgaaggttgcgattctgtggtaagaagaggggtaggaggccatggttggtatcgttctcattctttaggactctgttactagcaaatgacagaaacacacttcggtttaagaacaacaaaagtggagaatcagtcatgtgggtaaagagggcccaggccagacgtctctctggtctctgtctctcctgagcgcccgcttttctgtcagtttctgtgcttctcctaccatggctgcttcatgtggggtgggagagggggcctgtcgaccactctccgcataactatgagacccagctccagaagagaccagcagggtctccaaacgggcaggttctgacgggcccggcttggactcactgttccctccagtcctgcgggttttgactgagggttgggtcctgtccattctgtgcagtcccacagctctgtgtgcaccctgcaggcaggggcaggcagctcccttggaaagggaatcccatgagtcaggctggagcccagaaggagcctgtcactcagaggcctgataagcacagtgaatgttccctccttcaggagaagcagagacttcagtgtggtggcctggaaaggagaggggtctccgctgaaacacatctacatgtgttattctagggagggggtcaggaggccatcaggcagggcgatggcccggggccccagggagtggacccagacatctccctggcccccgtcttcagccggagtcatgagctggtggttgtggagtgttagaaaccacacaggtttggggcagctgtcactcaccagctgtgtgtccttgagcacctgtgaaatggggacagtggatgctgtctcaggacatgctgggaatactgggtgaggggctaacgtgtagtaacccaatagtagctgtagcaggaaacagctgacacaatgtcgcacgtcctgcctgacaggccctaagtgctctacgtacattaactcacttaatcctcatgactttcctgtgaggtaggtcctagtatcactcccatcttacagacaaggaactggaagcacagagaggttaagtaatgtgcccgaggtcacacagctggtaagctgcagagccaggattcaaaccaacatacaagccaggctgcccagcctgtcctctatggtcttactgtccctggcgtggttgtccgattcatccttgttgttcctaccttttcctagttgttttcagacattccaccatcccctctaggaccagggtttcgtatgtccacttggatctctcttgctttttacccatttttttcagttgttgtcatctcgcttccggctgaactctgaataaagcaggcctcggtccacattttaacccaaccatttactgtgtggcctcggaccagccagtacccctctctgatgctcagttttctgatccatggggatgcccctttgtgtgagccctactcatcaccactgccactgtcattgtgcttgcccgggctgtggagaagagctgatgccctcgagcctgggagtggctggagggtgtgtctctgtgtcaggggcctctgttgctgggattaaggcagcagcgtagcccccacccttcttcccgagtgctggtgaggctgctggaacaagcacatggttggttgtattctctgcccctgcagggggttggcactgatgaagcctgcctgattgagatcctcgcttcccgcagcaatgagcacatccgagaattaaacagagcctacaaagcaggtgaggccgctccctctgccctctgccctctgccctctgcagatccctgtgctcttggggctgtggcctcattctctcctagggccttttactccttcctggccttcttatcaacccatcttctgccacccccaatactttgggctttgacccaagacccagcccttccttctgtttatacatggtgcaaatgactaatgtaagggagaggcagggaaaacctggatgtggtttgggccaaggctgactagaggccaggtcagcctggaggtcacaggcttgtatatccctggagggccatatgggctatttgttctcttgagcccgagccaagacctccagcctttttctccccagtacccacttttgatagtgttttgcaatgggcagctccataaagagagctacaggatggaccttccttgcttctccctttcagaattcaaaaagaccctggaagaggccattcgaagcgacacatcagggcacttccagcggctcctcatctctctctctcaggtacttttcccacgacagggctcggggcccccaagccatggaagtcaaagagatgggatccccgcaatgaggaaagggaaaataaatggggaaggagtgggcatgaccatacacctgcttcctttcagggaaaccgtgatgaaagcacaaacgtggacatgtcactcgcccagagagatgcccaggtgagtgtgatggccaagcccctggacttcctaaagcagggatgcaccccgctttcttgcttcctgagagaggtaccctagggtggaaagaacaatagataagcagtgggttgcagatgctgtgagtttcagacgcgctgaactgttcaactgtatgacctagaacaggtaatctgacctccagggcttcagcttccccacctataggagggaacatgtgagataattagtatttcgatagttgatagatcatggttttggacgtgggattttgtgtgacagcgtactttccccatgtttagttgcacatagcattatgtttgcaaaggggcaaaatttgcacttgcttattaagtttttgaggatttgagcctagaaaccagctgccacattagttgagcacccttagaattctgtcgttgtccctcttgtgagttgcagacaaaaggggaaaagtccaagcaaagtccaggcatctgagctactctctcgaaaagtttgggtttcccactaatgaatttcaaccgtagtattatggcagggcagagccattacttcctggtggggtggagttggccatacctctctgtctcccttcactgctcttgtcatccacggcagggcattcaccaggagctgccagtggtctaaattatctctaccatctgcgggattggaatgagacctcaaggaatgcccccttgttagggctggaggagagctactcctctggtctggtccttttgctggtcctccttttccggaggaggaaactgaggctcaaaaaggttgagcactgttcccaactgaaagctagaagcagagcccggacaagggcctatactcctggctcggtcttctgtgcccagtcagcacttgcctctgccctggtctcagacctgctgctcctgcagggtctgccttattcagtgtctctctggctggtaacatccattcccattctgggagtcagggctggacacgcctggggctcagggctctggcttttgctccagcgagagttttgcatgccacttttagcggggcaaaaattgtctcatgctctgccttctcagtccagagctgctttggcctcatcttgacctgtgggatctcagcccctgattgctgctttctgctctttttcagggctgctacctgaggcctagcaggcactttagaggccatctagttcagaggttgcaaattggcaaatactttaggctcaaaccttcagaagtttaccaggctctcctgggtgacctgggcctggggtctgggtgtggcctgtgccacatgtgcgtcttcctctctctccaggagctgtatgcggccggggagaaccgcctgggaacagacgagtccaagttcaatgcggttctgtgctcccggagccgggcccacctggtagcaggtaaggcaggctggggtccctcagaggccagttagatgagggcagtcaggggattgtggggaaacaaagctatgggaacacttggtcgttcctccctgcgtggggctttcgcctcctcaaaagagccccctggtgggaatttaaaagacactgtcagagggtttcctgagttctggcaaacatccagttctggaggttctaccggtgtagaaacctggtgtctttgtacgtgggaatgtggaacgtcagagttgggagggtccttcgggagcacccaatccagtgttttccaaagcctggcataagaaacagtcataacaataaaactgggtgccattcatttactcattcattcaacagatgtaaatcgcgctcccgcatgggtcagtctgtcaggtggtggagcaggtgtggggccacggtggggggcagggcactgcagagtgtgttccatgggctgcactttctcatttggggagacagacagtaaacaacaatgaaataaaatctgtatcagatgggaaatcctgtagaggaaaatcaagctggaaacaggtagggagtgatggtagggtccaccgggaggtgcttgggccagtccccactgaggtcgtgacatttgatttaaaaacctaaagggagatgcaggggcagaggcctgcctggggctcccagcacgactgagaacagtgaagggggaccatgtggagcaggtggagtgagcaagaggagtgggaggtgagggcagagaggggagagggccctgctgatgacttcccggagctgggtatttatcctgagcaaaagaggaagccagtggagggccctgagcagaggaggctgtgcagaatccctggctgtggtgccgagaatggagtgaagggtgcaaggccaagcagcgaagcctgtcgggaggctgctgcagggacccggggaggaatggtggtaataggggcttgtggtgaggaggtgtcaggttccggccatgtttgctgatgaattggacacgtgacgtgtgggagagagagggttcgaggattatacagggtttctttaggccaagcagtgggagaatggccctcaactgagacagggggactgtaggtggagctggctttaggtgcctgtagggtggagctgcagggaggctgctgggttgctgagtgtggaggtcaggagaggtctggcctggttgtggaaggtaagggagctatgggtagttgaagttatctgaggctctgggactgcaggaggtcccctcaggagggagactgtggggagcccaccggtgtgaggagactaagaaggagcagctagggagggaggaggacgcagaggaagggggtcctggaggccagtgtgaggtggcaggcaaggactgaggatggtgaccacacggagcaactggtgggctgtggccagggctgctccagtgggcagtgagggtgaaaacccagcgaccgctctgtgctgcacacagagacaggcgctgtggctctccccattcgcagctgtgaaagcaggcacagggtggtagaggaagtaggggtgcacagctagtaacagctgagctgggatttgaacccagaccacccgaccccagagcacactttttaacctctgcactatcctgtaatggagcctgagtgaaagcattttcatcttaatcattatttcttttaatgagtacagaacatgtaagtagtgcatcaagcccatggcttcacaaacattattacttaggagaaaagagtagctgattggaagaagatattaattgagacagatacacacagagcagaaatcacaactttaaaatgcaaatggtagctgagactcaggctggggaaggagagttttatgtcctgggtcagaactggagtcaggaccaaggtctccatcatgccacctgtctctctaggagccagccatccactcctgtgggtgcttagcgtgtcctaggtcgaggtgagcagcaagaagccaggctggctggggcaggctgggcctcagctcacaggcaggctgaggaagacagatggatgcatgaataaagccaaggaatggcagagactggaggtgtggaggatttgagaagaggggacactgtcttggagtacatgggagtgggccctggaggggtattaaggtgcgatttggttaagcagattggcagtcctgagaaagggaccacacagggagggacatcaggtggtgcatgtaacttgtgacgaagactctgacttccttgagcgctagcaggcctggggacgtgcagggtgtgggagcagagtggcaggtgggagattttggggcagaggccacctcatgtgagtcctctgttagtctgctcatgctgccatgacaaaataccacagactgggtggcttaagcagcagatactcattttgttacagttttgaaggccagatatccaagagtggggtgccggtttctcccgtggcctcttcgtgacaatcactgtgctcacatggtctttcctctgcatgtgcacatccctgggatctctgtgtgtgtcctaatcttctcttcttctaaggagaccaggcgaattggattagggtacaccctagcagcatgttttaacttaattacctctttaaagatcttatctccaaacacggttatattctgaagtcctgggagttgggacttccacatatgaactttggggagacacatttcagttcataatataagcctctgtcatccccatagttttcaatgagtaccagagaatgacaggccgggacattgagaagagcatctgccgggagatgtccggggacctggaggagggcatgctggccgtgggtaagtgtctcaggtttgccgcccacctgccaggggctaacgtgtatcgtgagtgttcaggctgctcgcctgtcctccagctgatgggtgacaccgtgaagggaccacaggatccaagatcgctcagcccagagtgtccagatgctgggaagtcatgctgcttcccggttccctgtgcagttgaacccctagctgtcctggaggtgtcttgtgtgtgtttgcggtgcagctctggagtagggaactgcagtgtgggtattagtgggagggcatccaactgcgctcccggaggagtatgactcatatcctgccacgtttcctctaaaaatacatccctgcaggcagttgtcagatgtttgtgatggaaacacgtggaaagatttttacttgcagcagcgaaacaggcccatgctgaggaaagctggcttggctccaggatggtggtgtgcctcttacattgcccatgtcctctagcagggccctcccactgtgcagagttgggtccctgccctgaggccctcacaacccctctttctactcacttgggaaaatcagtctgccccttttttcattatgctttttttggagctttctggatgggagagatggaaaatcctcatttccctgcctgtcccccatagtaggtctcatggcctgggaagcctagggagatgcacattccactcagccacggtttctccatgacggtcatggcctctccagtctgcccctcctgcctgagcagcagcacagttcctcatcaccatccacattgcttccctgtgtagctcctagccccactaagacccccgcccctctgactcttggtcctttcaccgcagtggttgccaggaaagagggtgggttggtttccaggctttgcgtgtttctgttccaaatagctggagccaagatcatgggatagttgagcctggaacagaaggaggaggagaaaagatggatgcagtgatgggtttgacatctgggcctctaagaggacacttgtagactccatgccctgcttgggctgagaattttctgcagatctggttatgccgagtttctctcttctagtgaaatgtctcaagaataccccagccttctttgcggagaggctcaacaaggccatgagggtatgtaacttccatgtgcaggttgcgatggaaccttagcctcgcctgtgcctgggaccaagggctgagggcagaaggcctggggagagctaaatctcagctgagagttccgaggacctgggtagggaggggactggagggcccagggcaggtgggaaggtgaggaggcctggtgctcatgctcttgggtggactctctttagggggcaggaacaaaggaccggaccctgattcgcatcatggtgtctcgcagcgagaccgacctcctggacatcagatcagagtataagcggatgtacggcaagtcgctgtaccacgacatctcggtacgggcctgctgcaggccaactgggctcccttttggcatctcagtcacctgtggaacctccctccttggagtggccatatgcttggcctctgtgctgtgtgtgggcatcttgattatggacctcggacttgttcatccccttgcccttaaacagattataaatttctgagggcaggtggatcatgaccttgctgtcgcccccaccttgcatcccccagcagcatcagagaacactcgggacctccccaaccttgaccgtgaccttcagcgttccgatcaccgtgtgattccttgatctgtcagtgagaactcatgtcccaaaggctctgtggagctctgctgtcactccctgacaaagcacttcctgcactcagctttatggcgtaggccacatagtaaggccgttcagagcgagggccctgggggtcacgccacttggagtccagcttttctacttgctaactgtgtgaccttgaatggctcccttaaatctccctgaaccccagctccattgtctttaagatgagaaaataatcgttccttcctgggaatgttgtgagtattgagtgaggcagtgcaggtcaagtgtctattaaacactagccacagttgtatcgctgtgtggcagagccagtctgacaaaatacattctcagctgtgtggtctaacgctcaaattctgaactcacatgagccttgcaattgcaccatggggaccacgtcctcccaccttagactcagtagcatttgatgatggtgggcatgtcatcacaggaaactcactgtgtttccttggctgtatgaatgaagctgttgttagagaattagtgattctaggctgggcacagtggctcacgcctgtaatcccagcactttgggaggctgaggcaggtggatcatttgaggtcaggagttcgagaccagcctggccaacaaggtaaaaccctgtctctactaaaaatacaaaattagctgggcttgcctgtaatcccagctaattaggtaggctgcggcaggagaattgcttgaacccgggagacagaggttgcagtgagctgggatcacgccattccacttcagtcttggtgacagagtgagacttcgtctcaaaaaaaaaaagagagttaataattcattacagagtatctcctgcatgccagcaagctatggacatctggaagaagccacatgccttgccctcaagttgcttagggtggaaggaaatgattagaaatgagccaagccgagcctgcactcttagagtaagtgtagtggcctcagacagaggagagatccctgggacctgggcagtctgagccttccactggacagtcatgtgtgaggagattgcatttcctgagcaggacactgtgttgcgttacattggtaaccccaatttaaggcagcataaatgcactgggaaaacagcaatattggttagccctgggaagtggtttttaggatgattataatttttttttgtgggtattcatttgatgtggatagctggggtgagtgctgctttccgtcttctgatgggggcctggagaaggctgaactgcattttttaaggtctgtgacgcctgctgcaggacctgcagtgggagaaaattccccagggtggggctttctccctataagggtgctcagggctgaatatcaggacccagaaggctgaaagtgactgtccctcccttaacggatgtcttccttgtttctgtggccagggagatacttcaggggattaccggaagattctgctgaagatctgtggtggcaatgactgaacagtgactggtggctcacttctgcccacctgccggcaacaccagtgccaggaaaaggccaaaagaatgtctgtttctaacaaatccacaaatagccccgagattcaccgtcctagagcttaggcctgtcttccacccctcctgacccgtatagtgtgccacaggacctgggtcggtctagaactctctcaggatgccttttctaccccatccctcacagcctcttgctgctaaaatagatgtttcatttttctgactcatgcaatcattcccctttgcctgtggctaagacttggcttcatttcgtcatgtaattgtatatttttatttggaggcatattttcttttcttacagtcattgccagacagaggcatacaagtctgtttgctgcatacacatttctggtgagggcgactgggtgggtgaagcaccgtgtcctcgctgaggagagaaagggaggcgtgcctgagaaggtagcctgtgcatctggtgagtgtgtcacgagctttgttactgccaaactcactcctttttagaaaaaacaaaaaaaaagggccagaaagtcattccttccatcttccttgcagaaaccacgagaacaaagccagttccctgtcagtgacagggcttcttgtaatttgtggtatgtgccttaaacctgaatgtctgtagccaaaacttgtttccacattaagagtcagccagctctggaatggtctggaaatgtcttcctggtaccaacttgttttcttctgcttgattctgccctgtggctcagaggtctggccttatcagccagtgaaagttcatgtaaccttacgtagagatttgtgtgcaggaaaccctgagcatacactagtttgcagggactcgtaaggacatgggaagggaggttcccgaaatccaggcaggaggcccagacacctgaaaggcaaagggatcttggttggttgcaggtgcagtgaagtccactgaaggtgtggtgcgaagaatgcagtccttcacccaggtcccaggagggaagaagggtgtgtgctaattcctggtgcccctcggcgggggccagagagaaggatggggacaacccagagagtcacaagaccagtgcctcccctcagggtgcctccaggctgaaaggggctcctggctctggtctctggggaccctgtgcccgttggttggtggtgtgagggaagagaatccataagagagtttctgagaattatggtgtcatgtccagaagctagagcttaccttgcatcaggggtctccacccactccttttccaacctcctgcgttgaggtttagaaaagagagaatcgactaggcactatggctcacgcctgtaatccaaggactttgggaagctgaggtgagaggatcacttgagctcaggagttcaagactagcctagccaacagcgagacccctgtctctactaaaaaatttggccaggcgtggtggctcacggctgtaatcccagcactttgggaggtgaggcgggcagatcacctgaggtcaggagttcgagacccagcctggccaacatggtgaaaccccatctctactaaaaatacaaaaattagccaggcatggtggcacattcctgtaatcccagctacacaggatgctgaggcaggagaatcacttgaacccaggaggcagaggttgtagtgagctgagatcacaccattgcacttcaacctgggtggacagagtgagactctgtctcaaaaaaaaaaaaaaatttacctggcattgtagtgcattccctatagtcggctactctggaggctgaggcaggaagatccttagagcccaagaaattgaggccgtagtaagctgtgattacaccactgcactccagcctggacaacagagcgagaccttgtctcaaatgagaaaaaaacaaaaagaaatgggagaatccagagagactaggctagatcaagcctgctgggtcctggcaggagccccagggagtagctcatctgcagacatttgcttgaggactaccccctaaacataaaggaagaatgacatccgaagggtgtggagcagccatgagctgagaactagcctggtctacctgagattgatggcaggtcctggtcaacacgtcagctctgcgtcagagtccatgcctcaagcccaagctgaagccccatccctgctgctctcccaagaactcctctgctagggcaggccccttgcccttgggtgccaggtgggacctgcctgatgggatggggtgcttggcatatacaacttgccatgaactcaaggtgaccctgggggcctcctgaattgtgatggggcctagaaccaatgtgctctgatgtgaccatattctgtgacattaccttgccctgtttactccaaagttcccagcctggtgcccagcaggcaatattgcacctacagacacatttactttggtttccaaagtgtttttagacatttgaatttgttgccaacatttaaacattgagagatttcatatttttaaaaatctggaattctggcttctcttgaaaactcagaaattctggcactatggggcttgcattcctgcatggctggagctgagttgcagctgcccctttaggcctgtactccttatttgctataggctccgtcttgtattacactaagcccatgtcacccatttggctcctgcaggcctttgggtttgagaccctggtctacacacttggagaccacctgttgtaaagtacatggatgtgctttggtcaaggaatagaccaaggtggatatccaggccagagtgactcagcgagtttaggtcacaggcgtatactccacttgttatataacctgcttgtgtaagttcatacttggctcaaagccactattgtttggaaaaggtataactgccctgctgacgctgtacagatgttcttgggctcggatgggcatggctccacgtggtgtgcactagcacccagagagagtgaagctattgacccctgtaagggagagtgaccatctggcagatagatagaggggagccaggacatggctcagcttgtgcccagagggagagttaagccgctgaccctgtagccagggagtgcacctgcaagcatgggggtggcaggagccacagagctggctgctgagaggagctgcagatctggagaagacagcctaggtaaaggtggacagtgtgagagctgctgatgagatagctgctgaataaaactacattttacctgcctatggcccgccaggttttctttcagctatcgcccatccacccagtcccctcgaacctcagcatgggctggaacctgaccctgggcatgacatttggcatagttgtggacctgacacctgtgtttgtcctagtcctgtttctccctgccttcctgttcctctcgctgccctcatggtcactcccaagagatccaacccatgttaagtatgggctggaggactgcatgaatgcctcatgatcttcccagaggcaaaggcacctactgccttccaaggtcagtgggaggttgggatcaacactgtttattatgcttaggacaaaaaagatagggagaaagatgtgcaaccttacaggtcatctttctgggatagaacacaatgggtcttctcctgcctcctggatatgttagtcaaggccagtccatgctacacatctagtctgacttctaaaatagaagcaccagatgaattcagccctgagagaattttcagcagctgtgggggcgctggaggaaacactattaaatagttttgcacctgagacagatagcctcactcgcctcaccctagtcctggtggcatttgtctcaggtgcaaaatttaagaaagaaaccttggagtgctcaccctgtggctgggtagatggtcctaaagtggtggttttcaagcctgagtgtgtatcaggatcatcaggggagcttgctaaagagcagttcctgcggtcagaccctcatgcattttgagcaggtgtggggactgggaaactgcatctgtaacctgctgtaatctaacgcttatctaaatactactgtgctcacacagagaacaccgcaaaagtagaggtgttcctccagagggcaggtgagcagatggcacagtctgcttggaattcagtcaggtgatgagagatgagatgaggcactcctagctttgggaagagggagctgaaagatgaacctttgcaggtgcccacggtcaaagtggtggtttaatgccatgccatgcccattttctgttggccttggcagggagttacagccctaccttaggacctggctccttatttctgctgtaggctctttcctgccctggccgagatggagtggaatgagacctagaaacatcaagctaaatacatgtcctcagaaagataaaggtttacattttcacccccatcaaatctgaaagctctctgcctgtgtttttctaagggatagggacatcattactcagtccacaacctggactcatgtagggtcccctgtcagtaaaggagtcagtcaagcccaccaggtataccaaggactcttaccctcagcccctactccttggaaagctgccccttggcctaatattggtgtttagcttgagcctgactccttctcaacactaagagctgatgaagtcctgaagcagaaagagctctgacctgagagtcaaacatccttattctgatctcagctcagcccctgatttgttgtgtgaccctggatatgtcacttcctgtctttttgactttttaaaatgaagggtagactagaggagagcttctaaaactttaatgtggtcaacgaaatggaataggaaattccacaagtctgtccttccacaaaagcagcaaataaggtggcaaaaactcaaatttatgggaactctggaaacgaattgaaagtttacagcaatcaggtgaatacctaagaataaaagctggatttagtaaga

SEQ ID NO: 54 - DNA, 56600 bp, Homo sapiens
  source 1..56600: mol_type = genomic DNA
gcctgtaggaggactgatctcttgatgaaatacagaaaaaccatctcagaaaaaggaaaatgggcaatcgtcatgtaagtactcattgcctttgggaattggttttaattttggttagcatgtggaagaatttaaactataaaatcatgactgatacttgtatactttatcactatggttaccctttaatattggttttagcaacagcataccatgcttttaaaatgcattgaggccgggtgcggtggctcacacctgtactcccagcactttgcaaggccagagtgggcggattacttgaggtcaggagtttgaggtcagcctggccaacatggtgaaacactgtctctactaaaaaaattaaaaaaaaaaaaaaagttagctaggtgtggtggaacatgcctgtagtcccagctactcaggaggctgaggcaggagaatcatttgaacctgggaggcggaggttgcaataagccgagattgcaccactgcactccagcctggactacaagagtgaaactccgtcccaaaaaaaaaaaaaaaaaagcactggggatatattattcccttattggccaaaaatctcttaagaggggctaaagagaaagaagtatgtaaaataaggcagtaaatagtgccttgcagagagcaaatggttaatatgtatctgtagaatgtataactaaagctgttagtttgtagcaaatttgtataaaacttcataaactaagcccattcagagttatgtgggaaagataggttcatgttgcaaatattaatagaccaaggtaaatactcatgtaagtccacacaacttggattgcaaggtgaaaatattccattattatttctaaacatccacatatttgcaaatatccatggaatggacttaataatttacatttcttttgaaatgtttaggctcctgaatagtgtgtctataaatagttaatgactaaaaactgactaaaacactaccttttggaaccaactacacacaggacagatcagagttgaatcttgaatattttttacattgaagtatatctaaagctattccaatacaaatcttaataaggttttgtgtacctgctgtaaatttccacagcaagaatgatatatttcatgcacactatgagcagagaataaaactccaaaactttctgtaaactgttactttgtctataaggtttttccttcgctatatattcaagctgcactcagatgtttacaaacttacaaatatattcttaggaaaggcattgtttttcaaatcatctacaaatagcattttcataccagcagagattatgagccatccgttcagtgtatctttcagagaaactgaagcctatttttcaaatatttctgatagatgcagaggaccccaggaataatcaatggaccctgcattcacagcttaggaggataattttgtcttttgaaagtcaacctagggagcagctggcctttaggagtggaccagcatttttatgtatttttttttaatcctcagagccagtcgtacaccctctcagaaggcagtcaacagttgcctaaaggggactcccaaccctcgacagtcgtgcagcctctcagccacccatcacggaatggagagccagaggccccacagcctgtaagcactttattttccccccaaatcataggtatgacccctgctctgtcatggggccaatatgagcccccagtgatctgtcatgttggaccctccaccagccaccagccatcatcaggtgtgacttccaagcagggaaatctttccctgcaaaaagtttgttactgtatttacaggtaatgtaaaaatgaactcttctaggggcttagtttctgttcccaacagtgtctcattaacaactccttgaaatcaagcacatgaggctacaccaggaccactatgacatttcagaaaatagtaaaggaactcaacatgtgcacaaagaatgaatacatgtaaaaaagtaaatacaaaatctttttaaagaacaaaaaactatcccagtaatggcttaacttatttgcattagaaagttacttgaatatgtacaaacaaaactagaatgctggtggttttgaaacagctacacaaccaaaacaaatatataaattaaatgataatgttataagtcaatgctgtttaaatgtatgtcatcaacatagtgtaatagacaatgttattttgttgagattcaatagctgtgctcaacatgaaatggtcccaatggctataatgctgggtttgtttttttttttttttttgagttttacttggtttttgttttggtttggtttgttttctgaatctcagcaaatctaaaatatgatgtggtatgtgacttctgagttcttttatcatatttctctattgaacctactgagacacttttgtttgtaagcctccttgtaatgccgtgggaccttctctcggcttacacacatggtgtttctattaaatctccctctgttcactcttctttcatcattagcctgcaattattgaagtatggctgtttggcatataaacaatcgtaaatacaaacacaaatgcagacatttaaatcatgagccaggacttggtcatcttgatgatctaggatgctttatattaatttttaagttattatcagcatgaaatgcaaaagactcctagaaaagtttttattcccccaagaatatgtccacagaccagggcccatagataattgacaactattattgcagagccagtagaatattggccaggaaattgcatttttcaaggtactatcatctgaaatcctaaccaatcctgaaacgaaaattacttttgtgctatcctcaattcttttgccactattaatgatttttttgaaccaaagacctagtgtttgtaactaacctatgtggagcagcagtaaccaagatactgggtcattatcatccgccaaatcacacaatgttcaaagaatttccttatcctggaggacatgtccttgtgtccagtgagctttgcaggtagagtgtacacagagagaaagatcagatcagtggaaaaatctgcttaggtttagctagatgactcttctattgtctgggttttcacaagaatcactatctagggaaaaatacagaagtgagatcaatattaagattactttaccacgggagtgtggctataggatatgtgcagaatgacagagggagggagacctagtagagccattgataaatgtggaaataatcacaaactcaaatggactcatgatttctgggaaattacttgcaaggctaatgaacaggcaatagaaaggactacagccctgctactcaaagtatggtccctggatttgtagcagcatccacattgcgtgggcacttgttaggaatgcagatgctcagcccactcagatctattgaatcatagtctgcattttaacagactcttcaagtgattttcaggcacattaaaatcttagaagcactggactatggaacgcgttgtcaaacttgcctgcattgagatcacctgaggagttctaaaagccaccgatgcctgggtcccagccctagagtctgaattaattggtctggtggttgtcctgcgcatcagggtttgtaagtgctccccaggtggctctaatgtgcagcagagtttgagaaacactggactgtagaatatggctaacctttcaagaagagctctgcacactggggacaaaggcagatggtcattgcacatgctcctaactgaaaaccgatttgtaaatgttagaacatctgttcagtggtctgccacgttgtttgtgaacatgccaagtttatgacttgcttgtgccaatatttagccaacataaatattgtctccagtggagaacagtttgggacttgtggcaggtgaacaccaggcaaggtgaacactcagatgaacgtggacaaagaacatctgaaagctgcatgacaagtggggaaatagatccagattcctgagaaaagaagacaggctctggaggcaggtgaaatatggctgagaatttgaaattaaaataagtatggtcttaaccaagggtgtgcattaaactgtgatcccaaatccagaagacccatgatcaagccctagcagaaagcagtctagatcatttcaaaagacttaaataaataaataagatccttatttatttatttatttaagatcatcttaaataaataagattaggaaatattacttttttttgagacagggtcttgctctgttgcccaggctggagtgcagtggcacaattatggctcactgcagcctcaacctccctggttcaagcaatccttttacctcagacctccaagtaggtgggactacaggcatgtgccatcatgcccagctaatttttttaaagacgggtcatcctatgttgcccaggctggtcccaaactcctgggctcaagcgatcctcccacctcagcctcccaaagttctgggattacaggtgtgagccactgcacttgacctcaggaaatctattatcccagaaagttagtccttcagaatgccactgcaaaagtgtaggaggaagtgaaaagggcctttgatgtcaaagcatgacatgcaccaatgcataccttcttcatttaaagacaagtctctgaagggtagctacattttaggtacaattatgcaatcttggccttttggatattttgtctatggtggatgcaaaaaaaaaaaacaaaccagccattgtaaggaggtggtaagaagtcggcagaggacagatacactgatagaaggaagaacatgttaaatgaaacctcaacacaagaattctagagccgcgggagtctggagccacttggtgcaggggagagaatcctgcatgtcccagcagcgtgagcccacctcccagtgctacagccacagcaacaggaaccaaaactaaaactcccagtggtgatggttgtaactggaagtttaaacgagatcttctgaaatgttaatgataataactgacatttataaagtgcttactagactgtgggctgttttgagggtgtgaacagtgaccctggaagtttgagtccttcacgccaccaagcacttcacatgtgttacgtcatttggtcttcacaacaatcctatcagggagatactattattagtccccttttaaatatggggaaagtaaggcaaagagagtttaggtaaattgttcctagttggacagctagtaagaggtcaagcacagatttggatttaggcacaaatttttaacactatgccttgggttcaataaagcttctttttacgccaaatagaagattaacctattgggatttctgaaactgttgaactgaatcatcacctcgtcatctctttagccccttccctgagctttctccatcccctgccccccaagctggattggatgctcttccttaaggcttccatagttctctctgcataactattactccactcccatgtggttttagaaccatctgggttttttgtttttgttttgtgttttgagacaggatctcgctctgtggcaaaggctggagtgcagtgtcacaatcactgctcactgcagcctcagcctctcggggttctcctacctcagcacccccatacccccaagtagctgggaccacaggcgagcatgacaacgcccagctactttttaattttttgtagagatggggggtcttcctatgttgctcaggctggtctagaactccggggctcaagaatcctccaacctcagcctcccaaagtgctgggattgattacaggtgcgagccactgtgcccaacagaaccacctgttttgtatacctgcctcacactggactgatggtttcctgaaggtagaattgtattttgttcacctatatatccccatcaccaacacaatgcctgcagcatggtagatgcttaataaaatttggataaattcatcaatgcattcattgcattttctaaataaatcttaaacaaatcagtgttttgcccagttggagttcaaattcttatatctatttacattcccagaccaattcatgcgcaaggccctggcgtctgtatatttttaaactccccaaatgattctaatgtatccaaagttgagagccacgagtctaacgtcaggtattctagtgcagtagttttcaaatgaggtctcccaggcccgcatcattggtataatccaggatcttgttaggaatgcaaattctggagccccaccccagatctacagaatcaaaaactctggagatgggatccagcaatctgcatctgaacaagccttccacgtgaaactgatatgtgctcaagtttgagaatgacagttgaagcataagcctttcccatgcccaggctggggctgtgcctcagcattgactatggggaactcccaccattcaacctacagagatgcccagatgatggcattgaaacccgggttagcaccacacctgcctcctcaggcttctcacccggaatgcagcccggagaactcccccattctgctcatttccccaccccacccagggttccctctctccctgctgccatgtaagatgtgactttgctcctccttcaccttctgccacaactgtgaagcctccccaaccatgtggaactgtgagtccatgaaacttctttcctttataaattacccagtctggggtaagtctttattagcagcttgaaaatgagctaatacagacagcaataattggatttaggaaatactctaaatccaggatgatttcattttgagatccttaactaattacatctacaaagactctctttccaaataaggtgaattctgcggctgtgagtagacatgagttgggtgagggggtgggggtgatactgttcaacctacgacactaaggaaattagattttatttccttaggccagcagtgattttaaacttcagcacattagagttccttggaaggctttcttaaatggagagttgggtccaacccccagaatgttgattcagtaaatctaaggtggagcccgagagtctgcatttctgagttccctggtgatgttggtactgctggtctaggaactacactttgagaactgctgccttaggcatagggaagcccaagtcagaatcagacaagggagtaacaacttgagtgctgcttttagctagaccatgctggaagctagtggagaagggcttggagagaaacatgactagaggcaagtcaagcacttcggaagcagtggccctggagagaaatgaagaccctctgccaccctccaccctcatcggctaaaatagcaacaatggaactggggagaaggtagatctgagtcaaacgaacataacttgctaagtggatgtgggaggtgagggaaaggaagacgacagagtgactccaggtgtcttgtctagtttgtgtgcacaggtggatggtggcacatcccagggatgtaaggcagtgacagattgaatttggtttggggatctatagagtttgagatatctttgcgaagtatgagttcacagttgtttttgtttgtttgttggacaattagtatgtgtttgatcgaaagtagcacaccacaggactcactttggcttaaataacaaagacatttaattgtcaattctaacaggagctctgaattaagctgattccagtgttggttcagcagttcagtacatcattagggacccaagctatgtctgcctttctgtcagacatactctggatgtattagcaatgtctccccacctaggtgcaagataactgtcatgtgttcaagttaatgatctctcaagatagtcacaagcaagaaggaagcagatagagggaaaaaataccttcttgcttatgtacatctcccctatcagggaggaaaatctttctgcaaagctccaagcagcagacatccctttctatctcactggccagaactggtcaaaagcccaacccaagactggcaaagaggaagaggagagccttgaatcataattcatccctgaggctgaacaaatcatcttctcagttctctctctcttctttctatgtgttggcctctttctctcctactgaaaataagctttttgttttcctcgtatgggaagcaaaaggggctggtgagagggaggcatggccatagatagttcaggcaccaagagaactccatggcctcacatagctccagattagcagcctcaaggaaaatctcttctttctctaagtatctgtaagatgtcagggaagaattccagttggcttgggtcatggacctaccctgtgaataatcatagtaagtaaggttggccttatctttatcatcaccgctttcttataactattatatttattaatatactactgctattactactaccactactgatactaatactactagatggactgaaatagaaggaggatgcaaacttgaaaatcagatagaaagggagaaaataattctctttccaaataatggggacttggatggttgtagtaggaatgaaaaggaagataaaatgttaaagataattttaaagaaataatagactaaaaattaattaattaactaaaagaattaatttttttggatccaatgcataaactcttctaccaagggaaagaataacattcattgttttgatactgattgagacagaaatttgctcaaagcaaatttagctattttaccttgtttccttttcagcaaatcagaacttgtccacatactgttgactgcatcctgctacacagcacatttgatgccatgaaggccccgctcagcccccaatattctcacttttcaattccatctgcccacttatcattgactcttgaggattccagagtacacttgctaccttttttcctgcaagtaatgaatcccatgttcatactctcattgaattggcaaaagacgacctttggcaatataagaaggaaatggatcattcttttctaatgagaaacgtgcttcatttttcataactcctgaaagcatggttcctttcacggttgagaaatatccatcatctccacacaaccactttatcctccaagttctcttttgttgatgcaatacagtggtaattggatatctggaagtttagcactcttcagaggtctccaactccccaaacaatctgtggacaacctcaaagcagacagtcattttccccaggacacaaaatcttgtttccacataatgaatgttattctgcctctactagaaactccaagttctccagcccaacacagcactcaagggcccctaagaatgagtcaacagagagatgtcacttgggcacgttgccctgccggtataggctgggatgttcacaacaatcttgatgcagacaaagaagcaggaggtgacaacaggtttctcactttgaactgatctcagctcacaccttcctcctagttaccttatctcagcactcatctttcagatttgtcatctgggtttctttgcaaaaaaattaaagaatgtaagacatcatggtccatttctattcttcccttttaagttaccacagcaatttgcccttggtgactggaggccttgctttagtcagcacctgtgtgccgtttaccaccagaggcttggccttctccacactttttaaagagacccgttgacagaatcgttacaaccattcagccagggttgtggacccttggcacattcgtccttggcactgctgacatttgggaccaggtaattatttgtgtgtgtgtgggcggggggaggggggctgtctgttctgtgcattactgaaggatgtttagcagaatcctggcctctatcactagatattccagtaatactcccctactcgtgccaactgaaaatgtctccagacattgccaattgtctcctgggagacaaaaatcgctcctggtttattgagaaccaccgcttaaatgggaaaacaaggctccagggcagatgtcctcagaatgtctttatgtcactggatctccaccagaaatcaccattcctgcccttctggcccaggcatgtccctacactgatttcttctcttataacagagaaaagtcagcttctcctgaagattgacccttatcctcctgttgatgacagcagcagccaagaggcagcagtttttctcaaaactgttagcccatgagtaacaacttcttcttttttaaaaattctttatttctgtaggttttgggggaacaggtggtatttggttacatgagtaagttcttcagtggtcatttgtgagattttggtgcacccatcacccgagcagtatacactgaaccctatttgtagttttttattccttaccctctcccaccctttcccccaagtcccaaaaatccattgtatcattcttatgcctttccgtcctcatagcttagctcccacttatgagtgagaacatatgatgtttggttttctgttcctgagttacttcacttagaatagtattctccgatcccatccaggttgctgcaaatgccattaattcattcctttttatggatgagtagtagtctattgtatatatataccacagcttctttatccactcattgattgatgggcatttgggttggttccacacttttacaatcgcaaattgtgctgctattaatatgcatgtgcaagtatctttttcatataatgactccttttcctctaggtagatacccagtagtgagattgctggatcaaatagtagttcttataccagagtgagaagggtttcactgcagaaaccctcagtaaaaaggctgctgggctgctggatttcctgcctagatgagcagtgctcccctggaaagacacaggctggaaccttcaggagctgattggctcacctctcctctgtttgggtgtagcccccaaaagggctaccccacttggactccctataccacagctcagtgcatggcaggatgcccacattgtttacactcctgaggataccatcagtaccttcaggtacaatggtgcccaccagtttaaggcacagcatattgaagggccttcaagtcaggtctcctaactcctacccagccctgcagtcacctttgataagtaaatatcacatcaacacgtgtaacccagatggcatagcctaaggaagcttgtctttctggaaaatgacctaactataccaatcttcattaaaaggtgctgaaatgccaacatggaagcaatcccaaatgtaatagaaaggtcatgttttaatctaaagaactgaactcatttttcagaacatacagtcaacatatgcaagcaaatcatgttgagctgtgatccaaatggatgtttttctagttttagttttagttgttaaatgatacaaatatttctgcccctttagagtgatagccaaacacttagtcatcatgtaagtcactgtaatactgcatcttggaaaggaggtatcaacagcaatgaacaactctgtaacattccagcaccctactaaggtgggcagagctcaagtttcctaacacactttcccaacagctctctgatcaacccccgcagattaataaacttctaatgtgggaagaggttctaggcatgaaggaattggcttgcttttagtcggtgtgagatcctggagaatcctaatgaaaacagcaataactacatgatgaaataccaaatattcgtattcaaactgtgcttaaatatacccaacagggtatactgccaaatatatttttttctgttgggtagttttatgacttaatgaaaccaatatgtcactaatcacccaagattcatgcttcagatgtgaatggcccctctattttgtttcaaattgctcatcaatctctactaaccatgtctgtggaaatgtcaccaggatattttctggctctgaattcatgaatgttaaaagtacaataatttgcattcatactaactggcttcaaagtgcaaatgagtaaccggttagaggtaaaagaacattgttctgagagagataggagatggatgtttccataaggtgaccctgagcaggtgacttaacaaccaggcttcagtttctttatttgtaaatgatgggattggatacattcaatgtctcccaaacttcagatttaagtacaaccttcatgattgttgccaaatatatgggttacctcttctactaattattctattaattatttttaaatacgcactttttaatataaattaatcttaaaaggaaattttatactgataccataaatggaaaattaatgtcagttgacataaatatagataactaaatgaaagcaaaaagaatgtattaaattctaactaaatttgatgttgccagctgaagggtaaggtcctatcctctgactaaaaaaggacctgtttacatggtccacatgggatacagtgggagtccacaaagtaaataatgaggctttgtgggccacagaacctctggtgcaagtaggtaactactctgccattgtagcgtgaaagaagccataggccaaatgtaaatgaatgggttggctgtgttccaataaaactttatttacaaaaataagtaatgggccagatatggtcctcagtctgcagtttgccaacccctggattagacgagtgtgaaagatccactatcactaagcaaagacttaatcagaagagttgggagagaattttaaaaggagttcctttcctagctggaggtccaatggctttaatgctttcagtgttccatgtcacccatttggaaaaacctgggttcaattttcactttaagatttcatgctaaacctcttccctttatctttagcatcttggataaggtcaaggatttctttcttgtgtaaaccttcagcacatttctaagttgtcttcctcctttaccgggatatcaacagcggaagtttctaatttttctcagactaacggttctcaaccctggctgcttgttagaattgtctggggagttttagaaatatttatacctgatatatccctgtacctcagagattctgatttcataggatcagactgggatcccaaatgattttgagtgcaatccgggttgaaaggctactaatctatatcttggcaaggtcactttcctcagagtccattattttctccatttggtattaaattctaagagccccaaactctatttagctcaaactgtttcacacccgaaggtcttaggacttcactttcatttgtgattcctgttatttctccaactgaggtctgattgagccctcccagacaccttggttaaatttactgttcctcttttcattctctctgcttcatcattttggaaagcttgacactattctcagctcaagatttctatccagataagtttcctgttccattcttctgtccctactactgccactgactctgacattaatacaaactgggagcaagaccaggacgcaaagaaaaggcattcagtgtattctgtaacatacaaaggaagaagattcttcctcccatggaaaagaagataacatttaccaagtacctacaatgtgtcaagcattgtgctaggtgctggggatatgagagtgaacatgacataacctagcctccaaaagtcttacagtctagggaaggaaatagactaataaaaaagtatgataatgtatctgttaaaagatctgatagaagactctagagtggagggtagaacaaaagagtcagtggtgtgctagaatatgtctcaccaccagctctccaggagaaaacaaaagcctaatttgtggtgcttgccaatttccgtggtgtaaatactttcactgtgactgatttcaggttaccagcatgatctcgccaagcagagttgggaggagatcacacaatttgttcttgccagcttgcaaagtcagctccagctagcagggccaaccatcctggtttacctggaactgtcccagttttagcacttaaagacccacattccagggaacccctatgtcctgggcaatcaaacagtttagcttcagcacaccactggaagaattcgattcttcccaagaggatcaggaatggtttcagaaaggggaggcttcagcttatttgcttaagtagaaacattctccactgttgccaatggaatcaatggctctgtgctgtcaatctcaagtttctttggtcctccgaggactcaggaagttgcagggaggaatccacttgcagcattccccctttttcctccccctgcctcccactgatgggccccttgggaatcaaacaactcagcaatccatttgcatagattctgtcaagcagggagaagtgatattttacctataaatatatttggcaatttatccagctggaaagcaggcacccatcagaagaaagcatattggaaaccttggccatcccactggcttcgtgtcttttcagtcttcaaaatgtgtctgctaaaattcagccccctcgtacactgtagtcttttagctatgatccctcctctacttgaagggaaagatactttaggaaagggagaactggaagattgggtgtgaaatgaggagggaaggagaaggaagaagcttcctaacagcctttgaagggcagaagggccacttcctcccctgccagccctgagtcatcataatgaaacctccctgtccagcgctgtgacattgtcttatttaatcttcctgagattcttcagggtgggcaggtattagtcccattttacaaatgagaggcagaaaacatgattctattagcatcagaaggaatattgggagcagaatttgacaatagtgcctctcctacatacacactttgctcactgggagatggctgtctgttttgccttgcaaatagcggtgacttcatttttcattttactttctattttctcatcatcgagaatatttattgatcctacagctatgcaaggggttcttggcttctctggtcaccggacaagtctcaggtctcatctagtgtttctgtaaaagactatcattctaagagttgaactgagcttttctttctttctttctttctttctttctttctttctttctttctttctttcttttcttttctttctttttctttctttctttttgagacagggtctcactctgtcacccaggctggagtgtagtagtgcaaccacggctcactgcaacctcaacttcctggcctcaagtgattctcctgcttcagcctcagcctcccaagtagctgggactactggcacacaccaccatgccaagctaaatgtttaaaattttttgtagagacagggtctcattatgttgcccaggctggtcttgaactcctggtctcaagcaatcctcccgccttggcctcccaaagtgctggaattactggcatgagccaccctacctggcccagcttttctattattaaattaaaaataataactattatttagacaataaccccaaaaacccattaatgagaagtcaatagtagagtttctgaatccagactgcatgggtttgaatccctatctcatcatacttgtgtgtcttggtttttctcatctgcaaaataggaggtaataatacctaccccatagggttgttgggagaattaaatgagttgctatttgtaaacggtctggacccatgcccggcacatatgaagtgctctatattttgctgtcattctcaattttgagttttcctcctatacatctctcttagaactttagcccctgctactctttttctatgagtacaaagtgatttctaatttaggacaagcttttgtaaacagtcattttgagcttcctatagtaaacttccaattttaaaggcactacacaaagcaccatgcaaagggctcactcaacactcagcaggaatcaggtcaagatggaagaaaggaataaaaataacactcagcactcaccacgtgttgaatatcctgccaagcgctcttgatacatattctcctaacaacccatacgaggtgggtactattattaccatctttcagatgggaaaacagccttggaaaagatacggaggaaaaaacagcctcgtgcctggttcaaaggtagatgtctgtgagagaggaggcagaacttatgtgacctcaaagaagaaccttccccaaactggactcagtttccttaaatctgtagtattcttaagatctatacaaggcaagtttacaatggaatattattcagcctcaaaaaagaaggaaattctgccatttgtgacaacttgaacaaacctggggaacattatgctaagtgaaataagggagaaaaataaatactgcatgattctacttacatgaggtacctaaaatagtcaaactcatagaagtaaagaatagaactgtacttaccagggaccagagggaggggaaatgaagcactgttcaactggtacaaagttttggttacgcaagatgaattcgttctagagatctggagtacagcaaactgtaccctatactttattacacacttaaaaaattgttaaggtcaattgttaaggtcaagtgcagtggctcatgcctgtaatcctaatacttatggaggccaagactgaaggatcacatgaggcgggaggattgcttgagcccaggagttcaagaccagcctgggcaacatagtgagtccctcttgctacaaaaatttttaaatataaagtattatttgtttaatgggttgatgtcaagttaaatgttcttaactcacacacacacacacacacacacacacacacacacacacacggggacacaggaaacgttcatagctgatgaaatacttattaccttgatggtggtgatgatattatgagtgtatgcctatgtccaaattcaccaaattgtataattaaatatacaatatattttacagcaattatacctcagtaaagatgtttaaaatatttttcaggaattttgaaaaaaaaactatacaaggcaagcttaatcagaatcaccaatattggcgcaaggtgccattaaccaacagtggcaatggtaacagcctaaaccgaggagaatcaggtgtgtctgaggctctctccagcacacccttcacctgcctccattttgctcctgcttaacaagcccaggcaaaactacctggttctaatcttggccctggtatttaatctcatttcatgccagctcaaacagcagttctctgtagatcagtgtacagttagccctctgccctctgctccctggctcttcccgggggcccctcctggctcacagcccagatactaagcaaccattgtcaaatgtttactgagcagagtgcagccagccaaggcttctgaggaactgcactggaaatattaaacagtccaaatgccactcccattgcattttgataatactttcagagtttacaaatgacccttacatcctatgtcacccagcatcccacctcctacgtgccaccacctgagtgcttaccgtaatccagcaccgtgctactacatcccaaacacgaatgcatctacaccgcacaccaccccatgcacaggtgcatctccactttaaagatgagacaactaaggctcagagacgtgaatcagcttgcccaaggtggtacaaccagcaaagggcaaaacagcaattgaacagagtaggtctgactcccaagtccacactatgtggactattatgtcatgattagatgcaatcatgttagcacattgataggtcatagtaagcacgcaagtacacagactcccaaagcatcaggctgtggtctctccctggcatgtctttcttctacctcccctctctcttttatttaattgcttgtctaattcctaccgccctttgagaaccagcacaaatgtcaactcctccttaaaaattcctttctcctctcagctatttgtacccaaaagtgcttactgtatcataatgcaattgtcatgtgtcatttacatgtttatttccctgggaacagggactatgcttcataaatcatggagtcaacttcaactggggtagtgcttaacatacaatagattttcagtacttgtttgttcaaggaagataagggaggaaaaataaggagaagaaagaagaagaaaaagagaaagagaaagagagggaaaaataattcagagtctaatttgcctgtaacatatttcttaattaattcacatgcctctcatgaaacaatctattcttattgtccagccttgaagctattcaagtagaaaatcaggacacaaggactgacaagtatgaatgtacttaagtgagtgtatttctggctgtgttctggaagatgctggttactatataatacttagagcaaccaatttgcaaatcatatccctcagcaaactccttcacacattccatccccagagtttgctgcaacctggaagatgttcctagaatgttccatttctattataagagttaagacttccttgaattggactgggacagaaggcatttgatcaggcgtctgtttttccattctggttcttctggctgagggtatcagaatcttgattcaaaagagctgacctccctcctgggcaatctgctctgttgcagcaggaacatccctgagtcatttctcaacgtaggtgttttctgcattctttctgccaaggtgacaccgcttcctaggatcagagcatctcgtttattttctatgcttcctcctttgagaaaaatggatcattcatgtccttgttttagaggaggaaacacaggaacgtaaatacacagagaaggacatgtagacctactagaaggaagaaaaaaccaaagtggaagtccccccagcaccagtgctgccttgttcatgcaccaggcagtgcctttcatagagctgacagcacttgcttccattttggacctgaggtccaggcatgatggccagcacctcaacagaaaggtatcccagggagagtctcacaccccatgaggtgtgaattttcacactcgtcaaatgagacagttaacaaggtgtgatgttgggacatcatgccaggccacctggactccgcagtgtgactgcccggtgtaaaatatatgtctggaacttcagatccaagctgcaggtgaccaatgagaaattgatctttagagtgccatttacaaggtgaaaactcctcaagcaggaaaggggtttgaaatattctggaaagtttattgctgatttgccttcaacaaatatcaatagtttgcatttacaaagtccatgctgtcagccaggcttgttttagatgcttggcatgaataactttaattcctccaggaaccttacgtggtaggaactattattatccccatttaccatagttagtttctaagtgagatccgaaaaaagtcggtggggtggcgggcagctggaaaaacactcgaggaatcgcagggagtttcaacatggctttactctttctctgggcgcaagcgagcctgggtgcgagtctgggcgtgagccccaagccagaggtacagcgttagcagcgtaattgtaccttttacagacaacagtggctccaagccaagcacgagcgcatctgagtggttacttaatgcgcctcacgtggcgtggttacgtaaggtgtggacttgtgcatctgcactccaaacctgctgagacacgccccgtcagaaagtcgcctcggcctactccctactagagtgcagccatctcccttacaaccatgaagaaagtacagcacagagaggttctctaacttgcccgaagtcacacggctaataagcagttgtgctgggactcaaattcactctgacaataaagccacattcttcaactttactattatattttcagtggccacctattataaatatgatgttgcttgggcattataagataaatatttgacaagtatggaagatatctatccatctgggatcaacatatgtgaattagaaacctatatatctacatatggtacatatgtttgtgtatgtatcttcatatacataccttccaaacctgttaaatctaaatatgtagaattgaaatctgcttggatatcacttttatgaaatcttatcacaaggcaaaaagccaagaaatgacccaaagagacaggggaaggactaacatttatctagctccctgttttctggcatttgaaaagttatttcacgtaaacctcaagccttgcaacacagagactgctcccattttacagatgaggaaatggtagcttagaggttaatggcccaagttcacacagctgctaagaggcagatcctcattcaaaccaggattcctgtgggctcaaagcgcagacctccaaaatcattattattgacgtttaatatcttgtgctgtttttatctgtctcctgagtgtcagtgcaagcactgtcaaaaaataaacaaattgaaagaaaacaaaacaaggaatgttgccctggctctacaatgtctcctagttgaaaacaaatggaatatccgtgtggtctcctaaagcctcacaagcttgtcagaccccatcctggagtaccccgcagcccattctgtatctgacttgcattctcactgtatgcagaagttctgctcagttgcttcaggtttcaaaaactaaatctctggatagggaaacaggcctgaggcccatcgtcagctgtctatcctattaacaatgaacaatggacgtggaatgtccgctccatctacattcccgagaagaagttcggtacccagctcctgggaacaagccataggacacccgttccatcagcactgagcatcgctgatgaatacagccattgtggaggcagcccccaccacaatgaggggacaacgccaaaccgactgtttttctttttcttttaaaatcacatcacatgattctttcacttcgacatcaaatatcctgctgttacaaggaacaagcctgaattatcttctcaagcagattaggaaagataaccaacgtggctaacagtggttcctacagggagtcaggccactgggacctcaacctgccctgctgatggtggcgcctctgatagagagtcctaccccacattatttgttaaggtggctcacgcctgtaatcctagcatgttgggaggccgaggtgggtggatcgcttgagctcaggagtttgagaccagcctgggcaacgggtgagaccccatctctaccaaaaatacaaaaattagccaggcgtggtggcacatgcctgtaatcccagctacttgggtggctgaggcaggagaatcgcttgaacccgggaggcagaggctgcagggaaccgaaactgcaacactacactctaccttgggcaacagagtgagaccctgtctcaaaaaatttttttgaaaaaggaaaaaaggaaaaattaagtcccaatattatcttcattcatagcacatgactcaacactctcctgctgcacctcccagatatcagagttacttgggatcaaatgacacttatttactaggttttttggtcttgggcatgttgagagcattcttttgtctcacccctcagctcctacaactctgtgatatttgtatcatggaatggcctccctaaaacgggaaggggatgaggggcaggcatgtcatttagatctgtcagaatcagaaaatctggttctagccttggctcccactcaaccgctgcctggccaggtgatcttagacaagtctccacacggtctctgcaagccctcacagcttctttgtgcaaatgagaaaaaggtgacccttgaggggaagcagtcctgccagcaccaggcttggcaagcatgcccccagctcagttctgccccagcccctcagccagggcctcaggcagggcataacccacacagccatttgcagagccctgcatctctgtttcagcgcattagttgtcaagtgggacagatcatgtgtcccaaaaaattctctgcactgatgaggctaacaggacatagagaacagctcatgaattagccgagtgataggagatttctgttgccctgattcaattctacctcacttcctgggcactccataatacttcggatgaaaagcaaagaagccattactatttcgaagttgccacttccacacttagaggaccagctccttcagaatttgatcaaaagtagggtggcctttataagtgtgcagcctctgcaactgcatagggccccatgctcagaagggccctgtgcttggcttaatactctgatgttaccatattgaaattcttggtaatttttgaggaaggagccctgcactttcattttgtactaagcccagcaaattatgtagctggtcctgccaacaagcctacaaaagcaccaaatagctttcttacatctcacaaaagatttggataaggaaaacaggaggtatcattctgcaactccagagtcatccgacccctctgttggatgatggaagctctagttatagaatgtgaggcagtattgtgcgctgcacagagcacaggctttaggaggcaaattgagctgggttcagtcctgcatcctgccagacctcaaacaaattatctaacctgcctgaacccaggtttccttacctggaaggcagactagtaatgcccactcttccctatgcataatgaagaaaggtctataaactgcctggcacacagcaggtgtacaacaatgtcagtcccctttctggcttgtttcaggaacagatgctgcgagatggggcatgccctcatgttccaaaaggcagggaggttataggtggccctgatgttcctttcggctctaggagtctatgattctccattaactaaagcctcaagccaactcaccttcagcccacagatgttagccaggacactttggatcgcaaggatggaaacccaactcatattaacttagaccaaggaagtttgctagctaatgaaacggggaagcccaaggacacaggcgctgctgtgtctgaggatttgtacaatgtgattctttctctctctccctttatgtagtggacaaaatgggcactaagagccctagactcacgcactttcactgtagcagactcagcaggaggcagacgtgtatctctctcagtatctatgtatccaccaagggaaagactctaattgactctaatcctgcttggattacatcttcactcctgaaccaatcctgattgccagagtcacaggacacgtgcctacattggtgaccaagggcaggacaaaggggctcaagcctcatgactgacagccccagtgaggccacacaatgggggaaggggaaataaggagaataaggatgccatgcagagaaaggcaacatacccactgagctgcatgtggttgactgttcacttccactgggtgccaaaggatatgaaagcagggagagttgaactgcggtgctactgccagtagcacttaaaccagccttcactgaaggatggaaaatatatggacatgccgggcgccgtggctcacacctgtaatcccagcactttgggaggccaaggcaggcagattgcctgagctcaggagttcaagaccagcctgggaaacatggcaaaaccccatctctactaaaaatacaaaaaattagccaggcatggtggcgtgcacctataatcccagctatggggaggctgaggcatgaaaatcacttgaacccaggaggtggaggttgtagtgagctgagatcgcaccacttcactccagcctggttgacagagagagactgtgtctcaaaaaagaaaagaaaatatatggacacatatcacttaggaaaagctccatgagaaaaggcaaagacaggaaactcagggtgtgttcctagctaccagctgcataactacaattaacctcacaggttaattgcagtttttaatagttatgtgtttatatttatggttaccttccatttatgcaagcaatactgggtttccatttttgtgctcacaaaaatttcctttttaagataactttaagtaaaaacaaatgtcaatttaaaagaaaataataagcaaataataattataagcaaacaataatttccttattatttagacataggtaactgtggatgcaatagtgcatgtattgtgccaatgactgaagtatgggaaacagctcaatacactatataaacaggactttaccttcccaaggagcactaaaaccaaaactgtgcttttactggttcctacagtatctccaacaaaccaaatatgtatctctcattgtatggatggcaaagatccaagtcaccatatgaacctgtaataaggtcctagaaccctcagcctctgacctattccttagacatagctgtgtctcatgacaaagggggagaacaagcactccagtacactggcttacagtattattctttgtttcagaggcagacacacaaaggtggggttgatatgaaaatctctcattgcagagctggccaggatgattgtccttgagaacagaggggcccattctcctggtcatccaaggccagctggccccaaggagtaccagccacctctctggggccagagtctccccagctgatttccgcatgtaccagtgtgtgaagtgacagctggtccctggttaggatgactatttggtcctccagtttgctaccgattttagccagagatcatttaggaatgcgtatattgtcatctcaccttttcaattattttctccaggctaaagcgagcagtcctcagggttttgatgtggatcgagatgccaaaaagctgaacaaagcctgcaaaggaatgggtatgagagatattttgttgctaatttgcttctgaagttgattaaacttggtctcatgtccaacttccccatgatgttaggaagctgacatctcactatcttgtgtattccgagctaacgcaagtcaatcacttccactaacctctttattaaagttcgcaaaattacagtaggatcctattacttttcaggattctatataacagctaggagttggatattgtgacgtttaatttgaacttgaggtgagagaaacttcatgagaagtgcagttcatgcaatcctggtgtattagtctgttctcacactgctaataaagacatacccgaggtggggtaatttataaagaaaaagagtttaatggactcacagttccacatggctgaggaggcctcacaagcatggcagaagacaaaggaagagcagagggacttcttatatggcagcaggaaagagagaatgagaaccaagtgaaaggagtttccccttataaaatcatctgatctcgtgagactcattcactaccgtgagaacggtatgggggaaactgcccctgtgagtcaattatctcccaccaagtccctcccacaacatgtgggaattatgggagctacgattcaagatgagatttgggtgaggacacagccaaaccagccaaacctggtatgatctaaacccctctgatcccttccctaggagatggtggggaattgagtctgatgagagccggattagggacctggaagcagcatgtagaagtagatcggccgggcacagtggctcacgcctgtaatcccaatactttgggaggccgaagcaggcggatcacgaggtcaagagatggaaaccatcctggccaacatggtgaaaccccatctccactaaaaatacaaaaattagctgagggtattggcatgtgccggtaatcctagctactcaggaggctgaagcaggagaatcgcttgaaccagggagtcagaggttgcagtgagccgagattgcgccactacactccagcctgggtgacagagagagactccatctcaaaaaaaaaaaaagaaaaaagaactaaatcaagtgagtaactggccaagatcaaccatcaagggttgaaaatggagaagctgtttacatcctaagggtcagtgcatggccaagagtgggggactctgcaggaagtcaaaacaaaggtagaccagggaccagggtgggatgagggagacagcatctaggtctagggccatgaagagaggccctgggatccaaggaagccactcatgacacaaggtctagtcccagaagcctggaagagggtgacatccaaagcacagatggaaggatttcccttgaacaggacagggagggaaggtactgagactgacagctggagtagatgccttcataggtgttgttggggcagaaattgaaggcatccatgcctggtaacctgacattgctcagtgagtggtaggtgaggttgtctgctaaagagaagggtttgacaatggagtatggggcttgagtggtggcttgaaatagcccttgagtagcagagaagggggagacgaccaacagaagactgctgatacacactaagggccccactgagtagggagatcatggtttctcatggctccagcccacatggttgtgtgattttcccctgtatccttggaggtaggacgggaaaaattgattgactctgggcttgctgatcaggagttccagaacaacaagcaagtgaaatcattgaaggagacagaggggtcaaggggcaaagtggattaatttcctagattttcttttttacatttattgagaaacggttaaactttcaggcattggactaagcactttatatacaaaatctcatcaagttcttacaaaaatccattttccagctgaggaaactgatgacctgacattttaagtaagacagccaaagtcaccaagccagtaagtggggaacactgtgattgaacatattcttgtcactcactccaaatgccaccaatttagagacatcctagctagggcacctcagccacatggctgcagtcctggagggggtggggacagactgagaagacattgctcagtgtcattaacaataggtaggagccatgtcagtccacagaatgttttattaaactaattttttgcttatcgagatataatttgcataccataaaattcacccttttgcagcatgcagttcagagttttagtatattcacaggattttgcgaccatctccacttattccagaacatttcatcaccccagaaagaaacctcacacccattagcagccccttcctcccttcacctccaggcaatcactaatcagctttctgtctccacagatttgcttattctggacatttcacataaatagaatcatatgatatgtggcttcttttacttggcataatgttttacaaaaacaagtgataggttttttacatagaagtggattagtagagatttactttcctagaatgggtgtcatggtagaataaatatggccacaaattttttgtatggctccagaggaataaaacttggatccatggtagaagttccaaggaaacatattttgctttaatataagaaacttggctgggcgcagtggctcacacctgtaatctcagcactttgggaggccaaggcaggtggatcacctgaggtcaggagtttgagaccagcctggccaacatggtgaaaccccgtctctactaaaaatataaaaattggccgggtgtggtggtgcacacccgtagtcccagctactcgggaggctgaggcaggagaatcgcttcaacctgggaggtggagattgcagttgagctgagatggcaccactgcactccagcctgggtgacaaagagagacaccatctcaaatatatacacacatacatatatgaaacttatctagccatagaatggtagccttgcccaagaaatgttgacaagtctgcaggagttgggattgggaagatctggtaggaaagtagtacaagctatggctacatattaaaacccatttatgcctagtgttccattattgggacactaagcatgtgggagttatttatatcctactgctcaaggtcattgccaaggtctgattgcaaaaattcaaaaaactgcaacctcaggcatcaatgcgttaagaattcttgaataaatcagagctagagaatggggggaggaagacagagaaggagggaggaaaagaaagaagatagggagagagaagagaaagagagaagagagagggagggagagagtgaaggagagaaagaagagaaggaggaagagagagaaagaagaaagaagagagaggaagagagggagggagggagagtgaatgtgcaacctgtgttctcatctacaaaatgaggataacaatgtctcctcacatggagagggataaagcaggcaacgcagagcccagcacctcattggccctcgttgcatgtggatcgcctcctttggaacaatgtgctgggatccaaaatctgcacaaagccagtgagatcggtatgagcattgagtaggcgcgcccttgttctccatcactcagggtgaactgggttgaatgggggctccccaaaaatatatccccccagaacccgtgaacatgactgtttggaaaaagcgtctttgcagatataattaagttaaagatcctgagatgtgattatcctggattacctgggtgagccctatatctaatgacaagtgtccttaggagagacagagacacacagagaaggccatgggcagatggagacagagactagagagatatggccagaaacccaagaatgctaagggttcccggcagaagccaggaggggcaaggaacagacactgccccggggctgctggagggactgtgggcctgccgacaccaggatttcagacttccaccctccagagctgtgcaggaatagactgctgttgttttaagctatcaagtttgtggtcattgaatcagcagcctcccctccggaaactgagacagtgaacaagtgggaagcagtgacttgctcaggcaggcaggactgtgcccattcattacttcatctgtcttccttgcactcccatttccaaaggagaaatgagggactgcgcggcccagcagtgctagcagaagagagtgacccttaagcaccagagcgggggctgcagcctcctgggcccagccaggcaggctgggctggcattggagcccaagggaaagctgagcctccaccacagccccgatcactgttctgccacaagggcctgggggcttcccaccctgtctggagcccccttcctgctgaaatgtgactcggtatcttcccagaaaatttctcggaaaagcaaaaccaaggaggcccggaggcacttcctgaggctgattattgccccgtctttgacctctgctgtgaaattacagtgtccagtgtgtggctccttcttttctcatttttaaaaaagcctttcccagaaccactggggactggccctggtgcctcaaaccattgtaagtatttacaggaaatcattcagcggcactgcttatacgatacacatattgtgaaatgtaaagtgaggtcactgttcagtgactgggtagtagaaacaccccccggatcaacctgagacctggactcaaagaacttgggggaaatccagtgttgttttcatagcctcccccgacgtccaggttgttgctgggccgtctcaggactgttttgcaatctggtttctcgcccttttttttcttttttagctttaaaatttcatagatttttattaggttttttattattattattatactttaagttctgggatacatgtgtagaaggttcaggtttgctacataggtatacatatgccatggtggtttgctacacccatcaacccgttatctacattaggtatttctcctaatgctatccctccccttgcccctgaccccctgacaggccctggtgtatgatgttcccctccctgtgtccatgtgttctcattgttcaactctcacttatgagtgagaacatgcagtgtttgcttttctgttcctgtgttagtttgctgagaataatgatttccagcttcatccatgtccctgcaaaggacatgaactcattcttttttatggctgcatagtattccatggtgtatatgtgccacattttctttatccagtctatcattgatgggcatttgggttggtctctttttttttaaagcattcccaaaaagaacatctaaagatcactattattttcaatattaatttcattttcctgattatccagttgtggactccatgtggcatcagagtatggaggatttctattggtccttgctacacagacccatctgaatatcacatacaacttaaaccacttcagagacaaggttctgtcgtgatgacatgcaaacttcctcattcatccattcattcattcattcacccatcaattcattcattcatctgtgcacatgtttaagcatccgttcattcagcaagtcatctgataaatactgacagccttctgtgggaataccatggtgaacaaaatactctgctcccgtggaatttgccatgtgtcctggcagaaacaggaagagcaggcagcatgagagacacagagggcgagatgcctcatctgtccaggagtgtgcagggagctgagacctgaaggagaagtaggagtggaggtgaggattggtgtgttccagatgaggggaacagcccatgcaaagacccagaggcaagaaagaaagtgttgtttgttctaggagctgcaaatcatctacaaagtgggtggaaagtagcctgggagaggacaggtaggaggatgagactttgagaggccaaaaggccccataggcccccctgcagagttgaagcctcattctgcatttgagagggcctatactgaaaggtttgaagcagaggggtgagcaggccaatctgcacttcagaacggttgttctgggggcagtgaatgccaattggaaaaagtgagagcaacagaggaacttgcatgtgggtggtatccatagttctgctgagcgatggggtggagatgaggatggagagaaatgggtgcatctgagaggcactaaggaggtggaatggagaggccttagtctgattgaatgtggggtgagggaaaggggacagccaggcctgagccccagcttcctggctggcccagtacagtgagtgggtctcctgcacgcagaaaggctccttccgggcttggcacctgccaggatccaggcctgagaggccaaggccctcgtctgggacaggagtggcctgaatggaaagaaagaggtaggctcaagagatatttacaagaaaaagaaatcccttttgaagtgagatttctgacactccgaagtttttttttaaaaatcataatagtgtcatagaatgagtaattggattcccacgatggaggcgaagctccgggaggaaatgaaggaggacaacgtgaatcccagtgttgaaaccaagccagcaccaggcaggcaactcactcctgctatttttgcaagtgagatcctcctagaattctgtttctccaattgaaaccaaacagctaaatgttcccagagctgtagaggtgaaaatactctttgaggttaagtgaacggttcaaggacccaaaggtttggaacatggttgtcacatcagacccctgctcaggcctgtctttccaagtcgcctctctgtctttccaaagctgactctgagggctggtgctggagcagaaggagggttaaacagctcacatttttttgccagggctcccttttttttctctaccccatctccagctagtttccctccattcatttcccatccccatggcctagatttttcctactctcaacccttccatcaaaatgcattgcacgatcttgttccttcaggatcctgatggctcagctgggtggcagccatcatctaggtccacacaccaaccagagcaagacagcagtaagtgacactgtaacagcacacactgccatgtagtggccactccctagagcccaggtgtcgggctcagaatgtcactactgcagtcttggataatcactgcagtgatcctagaaacatacatgtaaatagtgtgctgtgccaaaacagaggaagcagaaacttaacaagtgtggctgagattaggtgagtaagccttgggctgctctgtgcagagatggatctagaagagtagcatgacaccaaactgcgggaagtctcgatgccaccataagggattctgatgtaattctaggagtcaagaggaatcactaaaggtatttaaagtatggtgtgaagtgaacacatgcgagcttcccagggtggactgcagagatcagagcctggtatcggggtgaaggctaaaaacacttaggacctgttaggcagtgacagaaggaatgaagaagaggaacaggtaaaagagttgtctcataggtgagacaggcaggacttggtagtatttgagagtaaaaaagactgatgggccctcaaaggtgactttggattttctctaatccgtgtgatgccatgcactgagacaaaggaacaggatgaggagtggatttaaggatagacaaaatgagtttggtttaagctacaatggaagttgaaatgccttgggagatccgtgggaagttgactacaggcagctggaaataagatctgaactcagaggagagattagggctagaggcgctgatcctggagtcatcagtcaaagggcgaaagtcgcctgggaaaggagtgactccaatagagaggagaactgaaaatcgagtttaaaaggccagtggaagaatacaggccaatcaagaaccctgagagggaggtgatggagaggagaaaggaaagactgggaaaggaggtacaaagccatctaggaaggtgtttcacgcaaagaattgtcaaccgcaggccgggtgcggtggctcatgcctgtcatcctagcactttaagaggctgaggcaggtggatcacctgaggccaggagtttgagaccagcctgaccaacatggtgaaaccccatctctactaaaaatacaaaaattagttgggcatggtggtgggtgcctgtaatcccagctactcgggaggctgaggcaggagaattgtttgaacccaggaggtggaggttgcagtgatcatgccactgcgctctagcctgggtgacatagccagaccctgtctcaaaaaaaaaaaataattcccgactgcagaattcaaatgctgcagaacagtcaggtacatgcaggaaccgagaagaggtgctgcattgtgcctcagcttcctcttctgtaaagaagagcttggactagatagtctctaacatttcctccagctccagagattgctgactgctgtgccttgatcccaccgagctcgatcactggggtgagcagttcatggagggtggtccctgtgcacaccctgcatggatgtgaggcagtgccaggcgcgtggtcatttacatcccctggtgtcccgggtttcccacgtgcgtgcttaggaccaccgcggactggacccacacttggattctcgcatttcattctcacaatagccttgtatactattaccctcatcttagaggtgggaaaactgagacttggcaagaaaaatcacttgcccaatgtcatgcagtcggtacagggtggagctgtgatttgagtccaacctgaataaatctaatgtggggtttgatggtaaaaccgtctttcttattcgcacactggaaatacctgtgtcatctttccgatcctggttcctggttcaaacaaggacattctccccttctttcttattcactatagttttcagtactgatcaaattgctgccatgagcttgtattactttgagcatcaggggtaaaaaagcttctaaaaataacataatctaaaggtaataggagttaaaaggggcaacctcccttcatggtttcaatcaagacttctctcctgagattaacaaatgtatgggtggggttaatattgtaacagtttcagcctatatcctaatcttgttcatgcaattgtaagcacccagaggccaaggaacaggccatctttttcctttttgttttttaaaacattttaattgagatataattcatgcaccatataattcacccatttaaagtgttcaattcaacagtttttattatactcacagatgcatgcaaccaccaccacagtcaattttagaacattttcatcacttcaaaaagcagccctggactccagctaccatccccctaggcagcccacccacccccagccactagtatacttccagcctctgtatattctcctgttccggactttcatacgaatggaattatataacatgtgatctgctatgattgacttctttcacttagcataatgttctcaaggttcatccatgttataacatctatcagtaatttattcctttttctggccaaataacattccattgtatggataccccatattttgtttattcatcttcaggtgatgaacactggggctgcttccacgtttgagctattatgagtaatgctgctatgaacattcacatgcaattgttgggtggacatatgttttcatttccctaggaataaaattaaggaaccagccatactcgttcctctttccaccacaatgcctagcactgtgtgccatgtgctgtgaggcctcaatggctatttgtctaagtgaatgaaaagaatacagttttcagcacaaggcatcaaagctaagggtccgttgggttccatagacacctccaaccacctttaagctgtgagtcctggcttcctcaccctggactaaaataaacttccaccttgtttcttattcactgtggctttgtttgtttctcctgtattttagggaccaatgaagcagccatcattgaaatcttatcgggcaggacatcagatgagaggcaacaaatcaagcaaaagtacaaggcaacgtacggcaaggtgattccaggggtggtcagcaagcttgcacccagccatggcctcagccgtctcggcttcctcatgtccccaggccacgcagaatatctttatagctttattgagtcagcccaggaggaaaagtgaaataaccacttaaaagcattaatggagttcagaaaaactgaaattgctttgttaactcaatagcctgtaaaatcaatactcttaaactcatttcttaaattgacttcatttttctatgaagaccctagtctttttttcacttaattgggactaactgtacatatgtagctagatcagtaatttgaaaatcagtttccacaagtgggtctttatacaggaatttttcataagcgattgttacagaaaactaccaaaaaaactctccattttattaagctatcaacacctatttttctttacattttctttcttttctttcattctttttattgttgaaaataattttatagagagaagtcttcaagtatgcattaggctttcttatttctttattaatatgtaatgaacacaacttaaacttttcttaatgtcattagaattatcattatgcaaaatgaatatcaattattatgctgtattctcatttatatttttcaaacttttaccatttcaatcactgtaggtataaatagatatatagaaagatgaagatgggttttcctatttatttgatactgagcaggtaacaattgcttcaggccttggtcttttcatggatagaaagaagatgataacttagctcccttctcaggttgctgggagaatcagtcaggataatgccagcatgtaccaatacaggaaaaagctatgatagctatgattgtttccattttacaaaatcacacacctaaaaaaaaaaaagagaaccaggactcacatccaagtctcacatccaagtctcctgacttcaagaacagtatccattcctggaggacccagtgccataaatagagctatttgcttgtacactaaatggcccaaatggctgtgcttttgtgctttttctgcttctctccttactattaggtgcgtcaatgtaatttttgatgaaaataagtgcatcttcagttcaactgcatttaattgaatgcatgaagctgaatgtgtgtgtggttttttttgttgttgttgttttgttttgttttgagacggagtctcactctgttgcccaggctggagtgtagtggcataatcttggctcactgtaacctctgcctcccgggttcaagcgattctcctgcctcagcctcctgagtagctgggattacaggcacgcgccaccatgcccagctaatttttgtgtttttagtaaaatttttgtattttaattttggtcaggctagtctcaaactcctgacttcgtgatctgcccacatcagcccaaagtgccaggattacaggtgtgagccaccgtgcctggcctgaagctgaatttttatccctgtcaacatccctaactccagtagcctcccaagacacattcaccctaccaatatgaaaagtcagtccaggcaaggtggctcacacctgtaatcccaacactttgggaggccaaggcaggaggatcacttgagcccaggagtttgagaccagttgagaccttcatctctaccaaaaataaaaaattagctgggcatggtggtgtgtgcctgtagtccctgctactcaggaggctgaggctggagggttgcttaagcccaagaagttgaggcctcagtgagccgtagttgcaccactgcactccagcctgggtgacagagagagaccctgtggaaaggaaagaaagaaaagaaaagaaaaagagagaaagggaggtggagaggaagggagagaagggaaggaaggaaagaaaaagaaagaacaaaagaatgaaagagagagagaaagaaagagaggaagaaggaaagaaagaaagaaaaatcggatacaatgcttcttaatctttagtctttagtctaaagaagagtaaatggattcaaactgaaagcctaggggccctgttaaaacttaaatgggcatgttctggcacaaaactttgtgatacttcatttgccaatcatttgcttactttctggttctcagctgtgtttcagagaactgagactgccaaacagataatctagaatcccaacaacgcaaagctagaagatgttaggtatgatccaatctcagccccgtgtcagttgacctccaaagagaataaccaccccgtggtaacagagtcagcaggaaaaccaggagtagagctgagctatcccgagccttctactctgtccagtcagaatgtaagcacacaaggatttgtttttatgcctgtggcttgtaagagtgggaagctgggatttttcttctctgcagcttatataatgcccatctggcctgaaaatatatttccaatttttagatgactccacaccatagagtactgaccacagacctgccttcacaagatgcagtgttggctggagcagccactgtggggcggaggcataatataacagcccccttgtaggactgcagatcccagggctttggacaaaaatattccgggtttttctcccaggccaagagctcagagcttcatttgaaaaatagttgatgtgcctcctcttagaaaatttttttcagcatgggagattaatgataagcatttattgaccgtttaaaatatgtcaggcagtaatgctcagtattgacaaggattgtcacatttaattctcccaaaaaccctgtgaggtcagtctagcactgtctccattttctagagctgaaaactgacagttggtgagattaagtacatttccaaggtcacaaaggtactgtggctgtgttctttgccaccatgccacactgctggggagctgcccaccctatgctatagtttgtgtccttgaaatgccagcttgtctatgggcctccaatctgagccatcccaggctgtcgctctatgtgaaggtctttggtttaagttagggcattaactactctaggtaggctgatgcccatccttgaccatttctcctgttaaaccacattgtcagagggagacagggagaaggtagttagttttcttgtgaaaagagggtgctcaaagaaaagaggaagacaggtgcttgtcagaatagatggcaggctggggtcatggtggctcacgcctataatcccagcactttgagaggctgaggtggaggatcgcttgagcctaggagtttgagattagcctggacaacatggcaaaaccccatctctacacaaaaaaatttaaaaattagccgagcatggcagtgtgtacctgtagtctcagctacttgggaggctgagatgggaggatcatctgagcccaggaggtcgaggctgcagtgagccatgattgcaccactgcactccagcctgggtgacaaagtcaccctgtctcaaacaaagaaaaaaacagatgccagtaagaattccatgtacttccccttctacatacctgcattcttcttcacctgtgtcccttccaggatttagcgagataacggaagtgacggtacaggccgtcgttcttcccatgacaatcctctttattcctgttatcctctgcaattgctaatagtgccccctttcacactgaaaggcatcccaatttggatgacaaattctccagtcctagagataacagccctgtatttcagcccttcctagctgaatatttggggaaaattcttcatcttatcaggttcaacagatcttgaggattttttcagcgatcttgaagactggctgaaaaagctctctgagctctcaaatgttccacagatactgttgttattgtgattcatcggtgaggtctccagccctgagcagggagctcctctctgcctctctgccagccctggggaaacgtggatgggcagctgagagcaggttgcatgttctcagcaggttgcaggttggcagaattcatgtccacagcacctttcttgtcaactatgagcacttgcaatagtgcaagcagacacctgcccctctcctcctgggccattcccagcacgtctctcactgtcttctggtaggagctggaggaagtactcaagagtgagctgagtggaaacttcgagaagacagcgttggcccttctggaccgtcccagcgagtacgccgcccggcagctgcagaaggctatgaagggtctgggcacagatgagtccgtcctcattgaggtcctgtgcacgaggaccaataaggtcagtcccagctgagcccgcaagggagcatcacacacccaatagagatggttgcagccccccagaagggaccctacttcccagcattctatccatggactgagcaggtgtctggggagacatatgtgtgcttggtccatgtgggaggacatctcttccagtcttccagaggtcagtcttggtgttgctgccacttaacagaatcgatcttttcagaagagctgtgtccagcgagcttctgcttttctaaactgatgcttttataagcaggaggcacaattctactttcccccacccagcctgactttgcggctcttctgacatgaaaaatcaacaagcagcccaagcatgcctgtgccactgcctgggctatggcggtcagctagcatagggtacaaaagagactataatgaggaagagaggtgagtggtgctgggggatgccagtgaacaccccagtggctgccagtactaccctgaagggttgtgtgtccttctgtcatcagacagagggatgtcactcggcacatgccacctttgcaggggctgaagagagcatttgttgaggccccatggagaactatttgtctctggctccagaagccaggagaaccaagggactcatcaagtcaagagggtccacaaataattcacaggagagacccctccctcttcagcaaccacacatgacagcagaatggggcagcccagcaaggaaaatgccagaagagcccaacattcttgaggcctctcagcaggaaatagaagcagatgttggagcagacagcaggcaaaatgcaaacagtgccctgacacaaaaatgcctggagaaggcctgggtgctgggccacgttcacgctgctcagcctcttttcctgaagtgccgccagggtccaggctacaggtgcaaaccttttctggagcatccccggacttcttttctccccacaagataataaaaatcctccatttcaaggagtctcaggttgggatgatgcttcggaggagggttagcacaggccccccgggagtgtgagttgaggccaagaggcacacaacttcccccactcagcatccacccttctcagaagcaccaaggtcccagcagggaggcagccaacgccagggcggtcagcacctgcctttgtgaaaaggttaattttaatcatatttttcaggccaggtacagtggttcacgcctgtaatcttagcactttgggagaccaaagcaggaggatcacttgaggtcagacggagtttgagaccagcctggctaacatgatgaaaccccgtctctactaaaaatacaaaaattagccaggtgtggcgccatgcatctgtaatcccagctacttgagaggctgaggcaggaggatcgcttgaacccgggaggcggaggttgcagtgagccaagattgtgccactgcactccagcctgagcgacagagcgagacttcgtctcaaaaaatatattcatatatatttttctaatctcatgtgatcatagctttttctccctcagcctagtttctttaagttcctggcttcaaccaataagcaaggcctctctatcaatcaaatagatctgatgggatgagaagaaaaacctgcagagagtgggtgccaggttcaggcagatcctggttgcgggttggaaggagaaaagggagggagctgcacaaacacaagtgatcagcctcccccagcacctagcctgcccttccctcccacccaggagcagtgaggctccccaccgctttctccccatcaccaccttctcccaatcaccacctactgactttcattttaaccagcttggtggtggggggggtgggggagcaggaagcctgctcttacaagctgctggttcaagtgtaaactgaggcagctcctgaggtgcaccccttggcaccagacattgaaatataaagcagtttctccaagaacacaccctcaagagaaactagcactcctgcacgcagccagtctgttactgaacgaagccttgtttgaaggagagaaaacttggaaacgacctaagcctccatcaataggaggttggctaagtaaaccgtagcttattgtagtatggaatattttgtgtccctttaaaaaactctaggtgactatccatgtacaagcatagctggatctccgggatactattattgagagaaaaactaagtcaaggaatgataggtacagtattccacctgctaaacacatgacacctatacaattctgttttcagtagcacatatatatacaaacgcaaaaaaaaaaatctgtgtatctttctgatacgcactgaacttctaacatgggttacctgagtggggaagagagagtgagaccaggcgaggaggtggtgaaagaaggtgttagcctagctgtaaacttctcacatttaaagaaagagaatgcatgcatttgtcacttgtgtgttagagatgtttgcagaggtgggcggagtggggggggggcgggccgtcacatctccagggactcgctccaggcgtgtgccctggacctatagggatgaccatcttaagaggaagtcttgaaggcactttgtgtccagacatggtctcccgcctcttctctctgtatctcttattgattaatccctccttggaatattgatttttttgtaaattaccttccctaggaaatcatcgccattaaagaggcctaccaaaggcgtaagtgacttttcattctggctttggataaagtatgtttctttcaaaatacctctgggaaactaaatcatctgctttcttccctccttgtttacttccttcgaagtatttgataggagcctcgaatcagatgtcaaaggtgatacaagtggaaacctaaaaaaaatcctggtgtctctgctgcaggtaagaggaaagaggtgtcacctgttttatcatcttaggaaagaatccttggcaacatggcaccatgatgaaaaagggtaacgtagataaacatttctttcttatattaaaaatattatcaagggattatcaacccatgctccatcagcccagctctggtgaaattatattcaattggaattacttccatataaacaatctgcctagtcatttgcagtttacaatcactttttgtaaatgaatcggctcattaagcatcactttgtcattttgccagtgaggaaatgtaggccatgagagggtgggtaacctgcccaggttcatgcagccagtaagagacagcccagaagcaagaaccagactatctgaccccaagcagggccgcttccacaacacaactctacaattacttccaggattcactggatcctgggcctgtaaggactacaacaagaaactcagccaggacatcagggctttcagaattggccctgctgggacacagccccccgagacctctagacagacacatctgtattcttatggacacactcatctttacgagctctgtgcattttctctgttttgtttctcccaatgggatacactgacagcagagaacagaagagagaggcttccactgcagcaggaagagagtttaagttttctcttgctgcataacaaatcgccacaaacttagcacctcagaacaacatagatctatcatctcacagtttccatgggtcaggagtccaagtagtatcttggagatccagctgaataatatttgggttcgctgagtcctttggtcaggttatcaacaggctgaaatcaaggtgtcggccagggctgccatctcatctgaggctcagagtcttcttccaagctcattaattgttggcagaattcatttccttatgtctgtgtttgatgtccccattttcttgctgttgaccagaagctactatcagctcctagagaccgccagcagctcccttccacacagtcccccaaggcagtgcaccacatggctgtttggtttcttccagtccagcagcagctcatctctctgacttcttccatctctgaccttttaagaagagctcattcatctgggtcaggccggccaaggataatctcccttttggtggactcagctgattggagacctgaattatatctgcaaaattcccctttgccattgaatataacacaatcacaggagtggcatctcctcacattcatagctctcacccacactcaagggaaggggattatacaaggatgtggaccattgggtcatcttagaattctgcccaccacaaagggctcaagttagacttccatgaccagctctcagggttttttaggactgggaccttgagtggtgaaatctgatattttgaaacgaagaggggactcattctagggaaaaccagagatcgcactcagtctgctcagaggtcagtggggtgtgtgggtgactctggtttctacaaaaaaaaaaaaaggcaaaaccaagtgttgccacagaagctcctctgtttatccattgtgcccaaaagatggcagcaaagagcaggtgtttcctccttgccaggctgaactgagctgagctgagaaagaattcacctctttctccaggactttgttttttttgttagtttgttttctgtggtcaagcaggaatgcaagttaataacaatgtgtcaatttttctaggctaatcgcaatgaaggagatgacgtggacaaagatctagctggtcaggatgccaaagatctgtatgatgtatgtgtgcagacatgccagtctctgcaaattctttttttaaatttattagcattattttcaacaaatgtttatttcatgcaaagaggagttacttgggaaataagaaacaaagatatgcttagatctttctagatcatatatatagtctccatgaatctaaatgaatggttcctattcttatactctggggttgaccacatcagatctgttttggaacaaagaatggtataaacaatataaataagtatgtgaaatacatttgtgggttagaagctgaaagtgcttagtccatttgacttctattcaatgcatagtttataatttcctgtcagtgaggcctagtcacagcactgcataatcagtcttttcacaaaagcctttttcaaagtgtttgtatttgacccttgaggcaggggaaggccgctggggcactgatgagcttgcgttcaatgaagtcctggccaagaggagctacaagcagttacgagccacctttcaagcctatcaaattgtaagtcataaagtattggggcaaaagagttcactctgaaagtgtcttaagttatttccaaaagaagccaagatctgcaataaggaattggggatcctttacaacagtggttctcaattggaggcgattttcctacctagggaatatttgataatgtctagaattatctggagttgtcacagctgggggtggtggccctggcatctagtgaacagaggcccgggatgccgctaaacagcctgcagtgcacaggacagcccaccaccaagaatcctccagccccagatgcagtacccaggctggaaaccggcttcacaacagacgccagggaagcaagtgtcccattcaggggagaagctctagagtccaagagtccaggtgcaaatcctgggtctaccactggcaagtgaccaaatctctccatcctgtttgtagaacaggaaccgtgaacatcatcttcacaccctcagagtgattttaaggttaaataagataaagactcagaacagttgagctggcatgtggcaagcatactaatgtttgctactattactccagtttacagttggctaacagtgcccaccattctcaagacagatatgaggtacctcaaagatagcctcctgaaaagatgcacataaattatattttaatcccaggataaatttaagcccacaaagcgagttagttatttcaaggcccttagcagtaagtccttccctgaaaagcagtctttacttgcaaaacgcctggagtggaatatcagattttttttttggcatcctattttatatgtgtagagtgcttttacctgctcaaagcacttctatgttctgtgtctcattcagtttcacaacaacagggtaactataatgtaggccgaacaactattgtgacccacaactgctggacaaggaaagtctgttgagtgaggaaccatctgtaacttatcaggaccacacagcaagttggtagcagagagtggatgagaactccaagactccccggcctgagctcctacctcagctgaagctggccactcctcactccaaatagcatttcctatgtgttgccagcagataaaaagacaataaagctttggaattttatcatgactgtatataagcctttagggcctgctcctttcaaatcgtgcccagagtcatgatcaaagacagctgaccctgcactcccctggtctcttgttcctggagctgcgtagcctctgagctggaggacttctctatgactgagatcctcctcccacactacggagcccacagatggagtttctgggtacgtgtgtgtgtgtgtatgaactgactacctgaaagtacactctccaggctaatatctcaaagttgatcctgaaacagcaccatcagcatcacttgagaatttgtttaaattgagaattctcagtccccaccagacctactgaatcagattccccggggctagggcctgaccatctgtgttagagcaggtgttccaggtgattttaatgtatattacagtttaagaagtcagctttaggctacagctgtatgtccttgtgcaagttattaagggttctgtgcctcggtttcccaaacgtaaaatagggataatagtacctacttcatagggttaataaggattaaatgagttaacagaaataagcagttagtccctggcatgcagtaggcgttcaatgaacattagcaattgtcgggcgtctccctgggtgaacagacagtgccaaaaatcagggctaaagcttatatgtacaataaggtaatctatggatttgatgattctttacatgaaaccagctctaaaatgctatctattcatccatttcaaaagccttgctcaagtgtcattcttgatatttattgctgatgtttttagagttcagcctgctcttagaccctggttctatgatttttctgatggcttctgaccaaaagcacagagatgctagtctgagatcactggagtttcttatgtggcatgagtcgtcctggcttagggttgaattttaattttcagcacaaaaactcagggttttgccatttatttatgctctaagcctgagtcttaacttctgacactcccagcaatcccaggccacgcaacagtttcccaaacttctgcatcatgcaggattattacagtccccagcgttaccaaatatgaaagacttatatagctataaaaccaaagtaaagtccccaaacagggctcagcataaacagtaggtatgcatacccatagcccactttgctgccacctcactgcgtgcctcaccctttgcccctcccctgtacatgttccttattccacgccagaggcttcagccctctaactgctatagtcagtgccagagcacagagggctctgctgtcagcgtgccgtccatttggggaaaccgattttcaaagaaagaaatgtctcccctgctcctctaataacctccctgcaggcattgctgcctgtttaactagagtcttagagacttgtttggaatctacccttataatgtgtttttctactgagatcagaaaatctgcttctgtacaaagagcccctaagaatcacgttgcagtaactgaagtgagaagtatccaaagtacagtcccaacagcttgggccagaccattgtttcagattgtgtcccacggagacgcctcagcagctaccaggagtagggtggggcaggaagcagacagggcagtaccttcttgttgcagtgtgtgaatagcgcctcctggagttgtgcaaggaaaaaacctgagcgggcaaaaacatggtatagatgccaatggcaagggaaaggagcccacctcccgcctcccagcacagctctgctttctgctttcatctgttttgtaggctgagattctacagaaaatttaaaatccctgctctagcctggtattaacaatagaaatggaaaacggtttaatgtgaggattttttaaagtaaacaagacctgtgtgaacaaaatgttctcttgaagtatgatctcagtctacagaacaagaaccttgtttctgggaaagggataccaatcccttccaaaataatgactcccacatcaaacccaaaaaagactgggggcagctaaggaagggacagttcccccactcttctaatctggtttctattgccacacaccaaggcctccagatatgcaaacaatgactaggagatcaagcaacagggcttcattaaatctggacacagttcctcccccgacatatattgtgcttacatcacaaagaacattttgtttacctgtgttttcaaaataaaccacataaactccactggtgcatactcaaagtccccaattatttatagaatcaattgtgtcatatcctcaaaagataatttctaagaaagaaatttcagtgtttctaatgcttaattgcatttctccaaacccagcaaagcattctcctttctctttatgtgcctgccctgagcttggcccgggcagtatttgtgttaaggatagtcacaatttactctgaacttcagcttctgtaaatatttagaaagaaacctaatgtgtaatgctgcgcagagcaatatgtgagccagtggtgaatataggattatttggaatcaccccagagtgaagacaagtggcattttgatgtggtcagcacccccggctcccagcccttgcagacccaccctctcaggaactttagatcaagttgttatcatgaacttcaccatgcctacttatttcactcaaactgtgactaagtccctggtcccaagacaagggagaggatggaggtgcatgtcagatgatcataaccacagcctcctgggaaattgaaactggaaagggtgaagaacacatgggaactaaactacacatcaatgttaaaaaaaaaatctatgattatagtatatataatatattaattatatatattataatatatattatatattaattgtttctccactcccaaattttacagatgaggaaattgaggttgagggagtggcactaaggtcaaatccattgggagtcaaatctagactgactcctcagcaacgagagccctctctcgaatgggtggcaaacaccccaatcctacaaggcaagagtcaggatagcagttccctgaagccacaggactaaatctggaaaacttgagtgctttttgtagaggaacaaccccaagagtactaaggtcaaaggcaaacctggaataacagttgattttggttttcgctgcagctcattggcaaagacatagaagaagccattgaagaagaaacatcaggcgacttgcagaaggcctatttaactctcggtaaagtaaagttaggagagctcctgtcttaggttgggctgcctggaaccagactcagacagaggtttgtgtgtaggaagatttgagggaatagcttttgggggtcaacaggtctaagcagcactgagcaagagagagagtgactgtgatgtagttgcaacaggggcgttgctgatcccacaggaagcttggaagctgagatgtccaaggtggagcaagggggccaggcttttgcaccccacatcaaacagtcatgtaacactggctgtaccaggggagcagtgcaactttgggcaagccagctctctcccttggagggagattcctggggagggactcagctgtgaatgactgcctcgatcctgaatagggcatctgagtggcacaccacagcatccattgcagtcctgctgtattagtccgttttcatgctgctgataaagacatagccaagatggggtaatttataaagaaaaagatgcttaatggactcacagttccacgtgcctggggaggcctcacaatcatggctgaagacggaaggcacagcttacatggtggcagacaaggcagaataagacccaagcgaaagaggaaaccccttataaaatcatcaaatctcgtgaaacttattcactaccatgagaaccgtatgaggggaaaccactcccatgattgaattatctcccactgggtccctcccacaacatgtgggaattgtgggagctataattcaagatgagatttgggtggggacacagccacaccatatcacccactaacaccatgggtccctgagggcacctgtcaacaacctagactgttatccagtttcaggcagcctgatagctcacaggtttccttttccatttggttcctttcaatgttttcaaataatgaagtttgtttggaaagagaggtgagggagatcagatcctgattgtgccaaccaaaccccaggacctcctctccaggtgttgcccaaaggcaggaaatagcagagagatgggcatggggctgtgtctgacaggctccttctttctttctgcaagccctggaatgaaggcattgtccattgtccacagtcctgtggtgaggaatccagggcaccaacccaaatggcagaaggaatggagagacctgttctcagaagaggaagaaccaaataagcagccctggaagttaaaaaatgtgctccagttgccaaactcttttgtttggtttctttggggtttttttgaacaatgtcagcaattgatttttttttaatccatccttattttgcattcaatgagcaagacctctgctgtgatatccggaggcctaaaaatccctggcattactcatgacccacactggatatatacacgagccctggtataagtgactgtgcttagggccttaagccatttatgccggaggttgcaattttttgaattgcagacatgtgtgaaaaattcagacctcggcgatgaccttgagcagtaggatataaataactcctacaagcttaacattccaataatggaacactaggcataattaagaagagtcttgagtagataataggatctactcacagcctggttctgaggctgtacgtccttgcttgctatacctgcattgtgagaatcgggaaaacaccagagtgcagtcagaagatggtattaaaactattcaatgatttaacatttactcagcacctgcctgggcccagggtttgtgctgggttgggaataagaggtaaataaggccagttcttgctcttaaggagcctaaagctcatggtggattttaagctggtgggtacaaatcaacagataaggctaaagataaagataaaaaaacaaagagcaaagatggtacagatgacagaaaagccaagtccctggggttgaggaccacacagtccaagagagagctgtactccagtggtagcgaaaaaaagtgattagaaaagaccttgagaataagccacacaaataacagaatacggcttcatgactattttctagacacttcccaccccgctcccacctaacttacagcgatgccagtttatgactaacatctaggagcagggggtgaggtcaaatggctcccaccacatccagcctctggagcagcatttctcaaagtgaggtctatggaccccctaccttggaatcacctgttacaatgcaggttcctgggccccactccaggttcccattgagaacctccaggaagggagcctgggaagccacacttctacaaactgtccaagtgactgtgttatactcactgaagttcaggaactcactctgaaggcaaaggggagcaagatatagagcaccgggctggctgcctttcctgccatttgctgtgaagaggtttttttctttctttctttctttcttttttttttttttaagacacagtttcactctgtcacccaggttagagtgcagtggtgcaatcttggcttactgcaacctctgcctcccgggttcaagtggttctcatgcctcagcttctcaagtaactgggattaccaagcctggctaatttttatgttattagtagagacggagtttcaccatgttggccaggctggtctcgaactcctgacctcaaatgatccacccacctcggcctcccaaagcgctgggattacaggtgtgagccaccatgcctggctgcagtgaataattttattccacatcttctttggctatccctgcccagccttttgagagattcctgctgctgctaacaacagaggttgttccccaagcatagattatagacaggagaaatgttgagagttttcttcctgaaatatcaggtagaaggaatgtcaagggagaagatccctgtgcaggagcggaacacggtgacttcaggcagacaatgatccccacatcaagccgtgctgtatggaagaggattttcaggaaaactttgtggtgctcattagctcaaattgtctggggatcacagtaagtcttgaatatgctactccccagaatagcatgcaagtttcccctgaaccaccaatccagcagcttttgggttgttctcaggagaaagaggccagacattgtttcttttccggtgcgattttcttttccactgaaactgtggcagctgccacatggcctgtaaaaggcggctggtccccaaactagactctccttcccgaactctgctcctctcccctgcttataagcatcaatcacacagacagtcccctagacaacaacagccccattatgggacatagtaagattgcacattccacatttatgctgaaataatcacttactgttaatcactaacatcatcaagtgttctagagaaatgttaacagcctaaagggcaaatattttttttttcctctaacgtgttagccatgatggattcatatgagcctgggaagaggggaaggaatgatttattcccaggagaagagatgcaccctgtcacctgcttgatgaatagagaccacgcttcattaagctgtagatagatcaaagctggaaggcaaggggaagccaggaaagagcaaatagcagcatcgtaggaaagtgatctttaaaaaggatcaaacatttcatcaagtccacatcccggattgcaaaccaaaagatcgtggggaacctggaaaaggttcagagatgaggcttgcaaaacaaccccagtgaggaaaaacaaagagtagggaggttgttgagcataggagagcaggcggctgtccaactggatacattgtcaagatgatgaagttttgttccagaaggttgctggccaatctgtttcccttcagaaccctaggacagcaccagagatttcactcgatagggaaagttatttctgctgggaaataacgagaatcatggacgtggccgggagggcccgaggatgccacagctctcctctagagggtcttcaggggacaggaggggagctatgcttgaagattccaggtgctctgaccagggaatcttccaaatctcatttcgcaacggtgtcaagtcagctcttttcacacctctgtctcaccatccagtcagctcgaagggcagccaggtgacatttaggggggtcccaaggtcattccacaaaacgtgaaagcctcacattctcttttcctttgtcctgcccagtgagatgtgcccaggattgtgaggactattttgctgaacgtctgtacaagtcgatgaagggtgcggggaccgatgaggagacgttgattcgcatagtcgtgaccagggccgaggtaagacacactccgactccaaagaggcggctgcaacttctcttttttccaccactgatgtcatcaacaaatagtttctattaagggcctatttacagaaaaagtaaaacagagacggccccttgccttcccagaatttgcagaagacattgtgctctgcttcaatctgtttctttttataaaaatacaataatgatcgttgcttctttttttgtcctctgtggctctggagagctagtggaggggcgcagaggcaaccatgtcgagcagttctcaggggctgcagctatgcatggctccatgttaaggaagacaaaacaaacacacttgaaagaggtcaaccagcagcaggaacaaaaagagaatgatttctgaattcctgagtgaggcctttccttaactgaacacactgcagaagcaagcacatcagcataaggcaatggttctcaatctttttaaaaactattgctgttctaaggaacctttttagacacgtgtttcttcattgccatcccttccccacaagaaatgttaacaccagagataatactacaaatctgtttatataccatgtggatatcagtgctttatacataaaaaaattaagggctttttcaccccctaaaaaccaatttgtgcttgctctcggagaatgtgtatgtataagaaagaaaagggagaggaagagccaacggcttgggagcagccgtcaagatcacagctggtcgggtgcaatggctcatgcctgtaatcccagcactttgggaggccgaggtgggtggatcgcctgaggtcaggagttcgagaccggcctggccaacatggtgaaaccccgtcactactaaaaatacaaaaattagctgggcatggtggcacacacttgtagtcccagctactcaggaggctgaggcatgagaattgcttgaacccagaaggtggaggttgcagtgagccaagatggtgccactacactccagtctgagtaacagagcgagactcggtctcaaaaaaaaaaaaaaaaaaaaggtcacagctaacagttcgggatatggggccacagacagaaggtggtacaaaataaaggggaagtggcatttcatcggcagcaggagaagccttggggaatgaagtggaactaagcacttgaaaaccacagacatcttccctcaaaaaaaaaaaaaaaaagtggttaaatgaagggggaggtgaagggggagggacaccaacccaaattctgatccatggcttcttaacaaataatgcttaacatctgacactgtttttaaatataactttgcaacaagatggttcttgcttttttatttctattcctggaatttctcctcccctcctttctcctcctccacaactcatctttttctattgaaggccatgtctctctctctcccctctttccctttgccagtctctctgctctgctcctgccatgcctctgcctctctcctccatggctccaaatccctctccctcctttctctccaggtcttctgccttgtccgtccctctgtctgttagcaactcgacctccagccaaagtcactgagagatgagagatcttgagggactcaaaagggacaggttgaacacaatgaagacccaggattccaaatgacccccagagagactggatccatccgaagggcttgtgagggttccgtgatcactccgacatggcccacggagtgttttattccaagaagctctgtcccatctcagaatcaaccacacgtcctgggccatctcaacatgtgggcagttacctcagaaggcttcaggcctggctagatatagtagtttggccagatttcctaatctcccaaagccacagaacagagccctgtgcaccccatccctacccaccctccaccttcctgcccgtgtcccagcacggggcaaggagccaagcagcggagcagggggacacacaggctgggggagagacagacaccacctgtctcctgtagtgtctgccacctgctccacatccactgcaaaccctccctcactcccccacatactcccatcctgatcatttctctcactgtctcagctcagccctctcactggggcaagagaagaaagaatcagatccctgagccacactttttgggtctggagtacaaggtagggtctaagccaaaaaagaaaagaaaagaaagactcctggttaaaaagagttctctgcttcttttatgagatccattatgttctacctggaattacatcttttctggtacaagtatcgtctcctttgctaggctgtaagaatcttctggcagagcaatctttggatttatttttctcctgagtcctatcatcacttctagcacctgggtttttcaagcttccaataaattagattcaaaataaatcctacaagttgctagtgatttgagttgtgttgactggtactaatatccttgctaatcatggtatgagggaaaaactgcttaattgcttaattccacatctctgtgttgacaattttcttagttttataccaggggtcaaccaactacagcctgcaggccaattcaggctcactgccaggttgtgtacagtcctgctagcttagggcaattcattttcaaataactgttaaaactcaaaagaaagataatactttgtaacatgtaaaaactgtatgaaattcaagagttttagggccaggcacggtggctcacgcctgtaatcccagcacttcgggagctgaggtgggtggatcacctgaggtcacgagttcgagaccagtctggccaacatgatgaaacccccgtctctactaaaaatacagaaaaaaattagccaggcatggtggttgactgtaatcccagctacttggggggctgaggcaggacaattgcttgaacccaggaggcggagattgcagtgagccgagactgcaccattgcactccagcctcggcaacaagagcaaagctctgtctcaaaaaaaaaaaaaaaaaaaaagaaattcaagagttttagtggaacacacacacacgtggacacctctgcaacctttggggaattgacctctgccttccctttcctgatcacaaaattgaaataacgtgataaaggaaataatgataggaaataaagccctatctcaagggctgttttaaggcatgaatgagcaaatgagtataacatgtgtagaacagtgcccactgtttgtgaacacaccataaacgttcttatctccattgctgttattttttctacaggtggaccttcaggggatcaaagcaaagttccaagagaagtatcagaagtctctctctgacatggttcgctcagatacctccggggacttccggaaactgctagtagccctcttgcactgagccaagccagggcaataggaacacagggtggaaccgcctttgtcaagagcacattccaaatcaaacttgcaaatgagactcccgcacgaaaacccttaagagtcccggattactttcttggcagcttaagtggcgcagccaggccaagctgtgtaagttaagggcagtaacgttaagatgcgtgggcagggcaccttgaactctggcttagcaagcatctaggctgcctcttcactttcttttagcatggtaactggatgttttctaaacactaatgaaatcagcagttgatgaaaaaactatgcatttgtaatggcacatttagaaggatatgcatcacacaagtaaggtacaggaaagacaaaattaaacaatttattaattttccttctgtgtgttcaatttgaaagcctcattgttaattaaagttgtggattatgcctcta

SEQ ID NO: 55 - DNA, 726 bp, synthetic construct
  source 1..726: mol_type = other DNA
gaagtgcagctgcagcagagcggcccggaactggaaaaaccgggcgcgagcgtgaaactgagctgcaaagcgagcggctatagctttaccggctataacatgaactgggtgaaacagagccatggcaaaagcctggaatggattggccatattgatccgtattatggcgataccagctataaccagaaatttcgcggcaaagcgaccctgaccgtggataaaagcagcagcaccgcgtatatgcagctgaaaagcctgaccagcgaagatagcgcggtgtattattgcgtgaaaggcggctattatggccattggtattttgatgtgtggggcgcgggcaccaccgtgaccgtgagcagcggcggaggcggctctggcggcggaggatcaggtggcggaggatccgatattcagatgacccagagcccgagcagcctgagcgcgagcctgggcgaacgcgtgagcctgacctgccgcgcgagccaggatattggcagcagcctgaactggctgcagcagggcccggatggcaccattaaacgcctgatttatgcgaccagcagcctggatagcggcgtgccgaaacgctttagcggcagccgcagcggcagcgattatagcctgaccattagcagcctggaaagcgaagattttgtggattattattgcctgcagtatgtgagcagcccgccgacctttggcgcgggcaccaaactggaactgaaa

SEQ ID NO: 56 - RNA, 1401 nt, Homo sapiens
  source 1..1401: mol_type = mRNA
agtgtgaaatcttcagagaagaatttctctttagttctttgcaagaaggtagagataaagacactttttcaaaaatggcaatggtatcagaattcctcaagcaggcctggtttattgaaaatgaagagcaggaatatgttcaaactgtgaagtcatccaaaggtggtcccggatcagcggtgagcccctatcctaccttcaatccatcctcggatgtcgctgccttgcataaggccataatggttaaaggtgtggatgaagcaaccatcattgacattctaactaagcgaaacaatgcacagcgtcaacagatcaaagcagcatatctccaggaaacaggaaagcccctggatgaaacactgaagaaagcccttacaggtcaccttgaggaggttgttttagctctgctaaaaactccagcgcaatttgatgctgatgaacttcgtgctgccatgaagggccttggaactgatgaagatactctaattgagattttggcatcaagaactaacaaagaaatcagagacattaacagggtctacagagaggaactgaagagagatctggccaaagacataacctcagacacatctggagattttcggaacgctttgctttctcttgctaagggtgaccgatctgaggactttggtgtgaatgaagacttggctgattcagatgccagggccttgtatgaagcaggagaaaggagaaaggggacagacgtaaacgtgttcaataccatccttaccaccagaagctatccacaacttcgcagagtgtttcagaaatacaccaagtacagtaagcatgacatgaacaaagttctggacctggagttgaaaggtgacattgagaaatgcctcacagctatcgtgaagtgcgccacaagcaaaccagctttctttgcagagaagcttcatcaagccatgaaaggtgttggaactcgccataaggcattgatcaggattatggtttcccgttctgaaattgacatgaatgatatcaaagcattctatcagaagatgtatggtatctccctttgccaagccatcctggatgaaaccaaaggagattatgagaaaatcctggtggctctttgtggaggaaactaaacattcccttgatggtctcaagctatgatcagaagactttaattatatattttcatcctataagcttaaataggaaagtttcttcaacaggattacagtgtagctacctacatgctgaaaaatatagcctttaaatcatttttatattataactctgtataatagagataagtccattttttaaaaatgttttccccaaaccataaaaccctatacaagttgttctagtaacaatacatgagaaagatgtctatgtagctgaaaataaaatgacgtcacaagacaa

SEQ ID NO: 57 - RNA, 1626 nt, Homo sapiens
  source 1..1626: mol_type = mRNA
gctcagcatttggggacgctctcagctctcggcgcacggcccaggtaagcggggcgcgccctgcccgcccgcgatgggccgccagctagcggggtgtggagacgctgggaagaaggcttccttcaaaatgtctactgttcacgaaatcctgtgcaagctcagcttggagggtgatcactctacacccccaagtgcatatgggtctgtcaaagcctatactaactttgatgctgagcgggatgctttgaacattgaaacagccatcaagaccaaaggtgtggatgaggtcaccattgtcaacattttgaccaaccgcagcaatgcacagagacaggatattgccttcgcctaccagagaaggaccaaaaaggaacttgcatcagcactgaagtcagccttatctggccacctggagacggtgattttgggcctattgaagacacctgctcagtatgacgcttctgagctaaaagcttccatgaaggggctgggaaccgacgaggactctctcattgagatcatctgctccagaaccaaccaggagctgcaggaaattaacagagtctacaaggaaatgtacaagactgatctggagaaggacattatttcggacacatctggtgacttccgcaagctgatggttgccctggcaaagggtagaagagcagaggatggctctgtcattgattatgaactgattgaccaagatgctcgggatctctatgacgctggagtgaagaggaaaggaactgatgttcccaagtggatcagcatcatgaccgagcggagcgtgccccacctccagaaagtatttgataggtacaagagttacagcccttatgacatgttggaaagcatcaggaaagaggttaaaggagacctggaaaatgctttcctgaacctggttcagtgcattcagaacaagcccctgtattttgctgatcggctgtatgactccatgaagggcaaggggacgcgagataaggtcctgatcagaatcatggtctcccgcagtgaagtggacatgttgaaaattaggtctgaattcaagagaaagtacggcaagtccctgtactattatatccagcaagacactaagggcgactaccagaaagcgctgctgtacctgtgtggtggagatgactgaagcccgacacggcctgagcgtccagaaatggtgctcaccatgcttccagctaacaggtctagaaaaccagcttgcgaataacagtccccgtggccatccctgtgagggtgacgttagcattacccccaacctcattttagttgcctaagcattgcctggccttcctgtctagtctctcctgtaagccaaagaaatgaacattccaaggagttggaagtgaagtctatgatgtgaaacactttgcctcctgtgtactgtgtcataaacagatgaataaactgaatttgtactttagaaacacgtactttgtggccctgctttcaactgaattgtttgaaaattaaacgtgcttggggttcagctggtgaggctgtccctgtaggaagaaagctctgggactgagctgtacagtatggttgcccctatccaagtgtcgctatttaagttaaatttaaatgaaataaaataaaataaaatca

SEQ ID NO: 58 - RNA, 1635 nt, Homo sapiens
  source 1..1635: mol_type = mRNA
gctcagcatttggggacgctctcagctctcggcgcacggcccaggttatcttgtagcatagcaacttcggatttcactctacccggagagtttcccgcttggttgaacacattggcctcaggaagcttccttcaaaatgtctactgttcacgaaatcctgtgcaagctcagcttggagggtgatcactctacacccccaagtgcatatgggtctgtcaaagcctatactaactttgatgctgagcgggatgctttgaacattgaaacagccatcaagaccaaaggtgtggatgaggtcaccattgtcaacattttgaccaaccgcagcaatgcacagagacaggatattgccttcgcctaccagagaaggaccaaaaaggaacttgcatcagcactgaagtcagccttatctggccacctggagacggtgattttgggcctattgaagacacctgctcagtatgacgcttctgagctaaaagcttccatgaaggggctgggaaccgacgaggactctctcattgagatcatctgctccagaaccaaccaggagctgcaggaaattaacagagtctacaaggaaatgtacaagactgatctggagaaggacattatttcggacacatctggtgacttccgcaagctgatggttgccctggcaaagggtagaagagcagaggatggctctgtcattgattatgaactgattgaccaagatgctcgggatctctatgacgctggagtgaagaggaaaggaactgatgttcccaagtggatcagcatcatgaccgagcggagcgtgccccacctccagaaagtatttgataggtacaagagttacagcccttatgacatgttggaaagcatcaggaaagaggttaaaggagacctggaaaatgctttcctgaacctggttcagtgcattcagaacaagcccctgtattttgctgatcggctgtatgactccatgaagggcaaggggacgcgagataaggtcctgatcagaatcatggtctcccgcagtgaagtggacatgttgaaaattaggtctgaattcaagagaaagtacggcaagtccctgtactattatatccagcaagacactaagggcgactaccagaaagcgctgctgtacctgtgtggtggagatgactgaagcccgacacggcctgagcgtccagaaatggtgctcaccatgcttccagctaacaggtctagaaaaccagcttgcgaataacagtccccgtggccatccctgtgagggtgacgttagcattacccccaacctcattttagttgcctaagcattgcctggccttcctgtctagtctctcctgtaagccaaagaaatgaacattccaaggagttggaagtgaagtctatgatgtgaaacactttgcctcctgtgtactgtgtcataaacagatgaataaactgaatttgtactttagaaacacgtactttgtggccctgctttcaactgaattgtttgaaaattaaacgtgcttggggttcagctggtgaggctgtccctgtaggaagaaagctctgggactgagctgtacagtatggttgcccctatccaagtgtcgctatttaagttaaatttaaatgaaataaaataaaataaaatca

SEQ ID NO: 59 - RNA, 1432 nt, Homo sapiens
  source 1..1432: mol_type = mRNA
agcgcggagcacctgcgcccgcggctgacaccttcgctcgcagtttgttcgcagtttactcgcacaccagtttcccccaccgcgctttggattagtgtgatctcagctcaaggcaaaggtgggatatcatggcatctatctgggttggacaccgaggaacagtaagagattatccagactttagcccatcagtggatgctgaagctattcagaaagcaatcagaggaattggaactgatgagaaaatgctcatcagcattctgactgagaggtcaaatgcacagcggcagctgattgttaaggaatatcaagcagcatatggaaaggagctgaaagatgacttgaagggtgatctctctggccactttgagcatctcatggtggccctagtgactccaccagcagtctttgatgcaaagcagctaaagaaatccatgaagggcgcgggaacaaacgaagatgccttgattgaaatcttaactaccaggacaagcaggcaaatgaaggatatctctcaagcctattatacagtatacaagaagagtcttggagatgacattagttccgaaacatctggtgacttccggaaagctctgttgactttggcagatggcagaagagatgaaagtctgaaagtggatgagcatctggccaaacaagatgcccagattctctataaagctggtgagaacagatggggcacggatgaagacaaattcactgagatcctgtgtttaaggagctttcctcaattaaaactaacatttgatgaatacagaaatatcagccaaaaggacattgtggacagcataaaaggagaattatctgggcattttgaagacttactgttggccatagttaattgtgtgaggaacacgccggcctttttagccgaaagactgcatcgagccttgaagggtattggaactgatgagtttactctgaaccgaataatggtgtccagatcagaaattgaccttttggacattcgaacagagttcaagaagcattatggctattccctatattcagcaattaaatcggatacttctggagactatgaaatcacactcttaaaaatctgtggtggagatgactgaaccaagaagataatctccaaaggtccacgatgggctttcccaacagctccaccttacttcttctcatactatttaagagaacaagcaaatataaacagcaacttgtgttcctaacaggaattttcattgttctataacaacaacaacaaaagcgattattattttagagcatctcatttataatgtagcagctcataaatgaaattgaaaatggtattaaagatctgcaactactatccaacttatatttctgctttcaaagttaagaatctttatagttctactccattaaatataaagcaagataataaaaattgttgcttttgttaaaa

SEQ ID NO: 60 - RNA, 4090 nt, Homo sapiens
  source 1..4090: mol_type = mRNA
gccggaagtgcccctcggggcggcgcggcgagggaccggggcctctcctgcaaccgccgttctgtcgccacggatgggaaggagtcgaccgcgagaagaggactgggggaagagggtctcagtgcagacagagttctggaaaagactgttgatatcacccgagccgcagggcaagctgggaaaggtagctcggcacagtccggctgctggactacaaatcccagcatactcctggaggagagggcgaggcggcagccgtgtggcctccacggcctcgaaggagatttgtggggtggcgcgtatgtggggactcggcaatttaaacacatcccgtgaagaaactgccaacaactaagttcccccccccccccccccgctgtatgttccacccttctggagccatcttatttgcggcctggcctcctggcacaagggattctggaggttgtggtttccgaacggatcgagactgacacctgaaggacgcggcttaaccgcttagcccctagcgggtcctgtgggtttcccgacgtctcctgggctgaaatggaagcgagaagtgatcgggaacattgtgctggcagttggatccggctgcaccgagcgccagccttgaaataagtaaaaccgatgcccttccgcccctaacctcaaaagctgcttttgcgtctcgatgttattgagagccggctctgcggtcagctctgagctaggcgctgtgagaacgctcagtaagacagtgtctcgtctggaaatgtacaggcgagattcaaaccgagaaactgccaaaggttgtgtgcagggcagatcctaggataccggagacccagcccgttggcttgacctcaaaactcgggggcttttcggcccatgctgtcccttaattcctcctcctttgctgacgctgtgggtgcgcatcaaagcctaaacttcactagctcccttgcacacaagaacactaaccctaacctgaccagttatttatttttcacttcaagattcttccattgatacttacgtttccctgataccgtccaagtgctgagggcggggatggactgtgtgatttgcatctgccaaatgcagaaaatttggaagttcacagcctcttagttggatgcccctgtgtcacagaacacattttggctatggggtgtgatctgtgtctgaggaacaacaagaagctacacgtcatccacacaggagccaaatctggaactctggtctcagttcttcaggactatttgagcgaataatcactcaacactggagtaaaggatgttctactagaagtcttattctgactcctaaaaccacgctaccgaaagtgttgatccacaaaccagtgccagtgcttgaactttgttactggtccacagttaggtcccctcagtgattcctgtgtgcacccagggttgagaactactgcataagaggtcctagaagatatctggtatggccagagtacagagggaccggagaagaacttctgcttgggtggctgaactctgatcttgacctagagtcatggccatggcaaccaaaggaggtactgtcaaagctgcttcaggattcaatgccatggaagatgcccagaccctgaggaaggccatgaaagggctcggcaccgatgaagacgccattattagcgtccttgcctaccgcaacaccgcccagcgccaggagatcaggacagcctacaagagcaccatcggcagggacttgatagacgacctgaagtcagaactgagtggcaacttcgagcaggtgattgtggggatgatgacgcccacggtgctgtatgacgtgcaagagctgcgaagggccatgaagggagccggcactgatgagggctgcctaattgagatcctggcctcccggacccctgaggagatccggcgcataagccaaacctaccagcagcaatatggacggagccttgaagatgacattcgctctgacacatcgttcatgttccagcgagtgctggtgtctctgtcagctggtgggagggatgaaggaaattatctggacgatgctctcgtgagacaggatgcccaggacctgtatgaggctggagagaagaaatgggggacagatgaggtgaaatttctaactgttctctgttcccggaaccgaaatcacctgttgcatgtgtttgatgaatacaaaaggatatcacagaaggatattgaacagagtattaaatctgaaacatctggtagctttgaagatgctctgctggctatagtaaagtgcatgaggaacaaatctgcatattttgctgaaaagctctataaatcgatgaagggcttgggcaccgatgataacaccctcatcagagtgatggtttctcgagcagaaattgacatgttggatatccgggcacacttcaagagactctatggaaagtctctgtactcgttcatcaagggtgacacatctggagactacaggaaagtactgcttgttctctgtggaggagatgattaaaataaaaatcccagaaggacaggaggattctcaacactttgaatttttttaacttcatttttctacactgctattatcattatctcagaatgcttatttccaattaaaacgcctacagctgcctcctagaatatagactgtctgtattattattcacctataattagtcattatgatgctttaaagctgtacttgcatttcaaagcttataagatataaatggagattttaaagtagaaataaatatgtattccatgtttttaaaagattactttctactttgtgtttcacagacattgaatatattaaattattccatattttcttttcagtgaaaaattttttaaatggaagactgttctaaaatcacttttttccctaatccaatttttagagtggctagtagtttcttcatttgaaattgtaagcatccggtcagtaagaatgcccatccagttttctatatttcatagtcaaagccttgaaagcatctacaaatctctttttttaggttttgtccatagcatcagttgatccttactaagtttttcatgggagacttccttcatcacatcttatgttgaaatcactttctgtagtcaaagtataccaaaaccaatttatctgaactaaattctaaagtatggttatacaaaccatatacatctggttaccaaacataaatgctgaacattccatattattatagttaatgtcttaatccagcttgcaagtgaatggaaaaaaaaataagcttcaaactaggtattctgggaatgatgtaatgctctgaatttagtatgatataaagaaaacttttttgtgctaaaaatactttttaaaatcaattttgttgattgtagtaatttctatttgcactgtgcctttcaactccagaaacattctgaagatgtacttggatttaattaaaaagttcactttgtaagaacgtggaaaaataattttaatttaaaaatggtgtttttaggccgggggcgggggctcacgccagtaatcccaacactttgggaggccaaggcgggtggatcacctaaggtcaggagttcaagactagcctggccaacatggagaaactgcatctctactaaaaatataaaaattagccgggtgtggtggctggtgcctgtaatcccagccactcggaggctgagtcagggagaactgcttgaacccaggaggcaggaggcaaaggttgcagtgagccgagatcacgccagcctgggcgacagagcgagaatccatctaaaaaaaaaaaaaaaaaaagtgtctttaaagtgaggtatagtctttctctgatccacttttcaccttctgaggtttttcatcttggcccctgaaaggagctatttttgaaggacttgtgttactcagtttctacaggaattacaagataagaaaaaaaaaatcatatttagtcttatgcgtgcctactggctaatgttcacatatgccaaacactactcaataacataaaataatgtatgaacttattctctggaaatgagtgatgccctctgctctaagtagaccatttatattaaatatcataaatgtataaaggacattcatattctta

SEQ ID NO: 61 - RNA, 2651 nt, Homo sapiens
  source 1..2651: mol_type = mRNA
gtgacctccgcagccgcagaggaggagcgcagcccggcctcgaagaacttctgcttgggtggctgaactctgatcttgacctagagtcatggccatggcaaccaaaggaggtactgtcaaagctgcttcaggattcaatgccatggaagatgcccagaccctgaggaaggccatgaaagggctcggcaccgatgaagacgccattattagcgtccttgcctaccgcaacaccgcccagcgccaggagatcaggacagcctacaagagcaccatcggcagggacttgatagacgacctgaagtcagaactgagtggcaacttcgagcaggtgattgtggggatgatgacgcccacggtgctgtatgacgtgcaagagctgcgaagggccatgaagggagccggcactgatgagggctgcctaattgagatcctggcctcccggacccctgaggagatccggcgcataagccaaacctaccagcagcaatatggacggagccttgaagatgacattcgctctgacacatcgttcatgttccagcgagtgctggtgtctctgtcagctggtgggagggatgaaggaaattatctggacgatgctctcgtgagacaggatgcccaggacctgtatgaggctggagagaagaaatgggggacagatgaggtgaaatttctaactgttctctgttcccggaaccgaaatcacctgttgcatgtgtttgatgaatacaaaaggatatcacagaaggatattgaacagagtattaaatctgaaacatctggtagctttgaagatgctctgctggctatagtaaagtgcatgaggaacaaatctgcatattttgctgaaaagctctataaatcgatgaagggcttgggcaccgatgataacaccctcatcagagtgatggtttctcgagcagaaattgacatgttggatatccgggcacacttcaagagactctatggaaagtctctgtactcgttcatcaagggtgacacatctggagactacaggaaagtactgcttgttctctgtggaggagatgattaaaataaaaatcccagaaggacaggaggattctcaacactttgaatttttttaacttcatttttctacactgctattatcattatctcagaatgcttatttccaattaaaacgcctacagctgcctcctagaatatagactgtctgtattattattcacctataattagtcattatgatgctttaaagctgtacttgcatttcaaagcttataagatataaatggagattttaaagtagaaataaatatgtattccatgtttttaaaagattactttctactttgtgtttcacagacattgaatatattaaattattccatattttcttttcagtgaaaaattttttaaatggaagactgttctaaaatcacttttttccctaatccaatttttagagtggctagtagtttcttcatttgaaattgtaagcatccggtcagtaagaatgcccatccagttttctatatttcatagtcaaagccttgaaagcatctacaaatctctttttttaggttttgtccatagcatcagttgatccttactaagtttttcatgggagacttccttcatcacatcttatgttgaaatcactttctgtagtcaaagtataccaaaaccaatttatctgaactaaattctaaagtatggttatacaaaccatatacatctggttaccaaacataaatgctgaacattccatattattatagttaatgtcttaatccagcttgcaagtgaatggaaaaaaaaataagcttcaaactaggtattctgggaatgatgtaatgctctgaatttagtatgatataaagaaaacttttttgtgctaaaaatactttttaaaatcaattttgttgattgtagtaatttctatttgcactgtgcctttcaactccagaaacattctgaagatgtacttggatttaattaaaaagttcactttgtaagaacgtggaaaaataattttaatttaaaaatggtgtttttaggccgggggcgggggctcacgccagtaatcccaacactttgggaggccaaggcgggtggatcacctaaggtcaggagttcaagactagcctggccaacatggagaaactgcatctctactaaaaatataaaaattagccgggtgtggtggctggtgcctgtaatcccagccactcggaggctgagtcagggagaactgcttgaacccaggaggcaggaggcaaaggttgcagtgagccgagatcacgccagcctgggcgacagagcgagaatccatctaaaaaaaaaaaaaaaaaaagtgtctttaaagtgaggtatagtctttctctgatccacttttcaccttctgaggtttttcatcttggcccctgaaaggagctatttttgaaggacttgtgttactcagtttctacaggaattacaagataagaaaaaaaaaatcatatttagtcttatgcgtgcctactggctaatgttcacatatgccaaacactactcaataacataaaataatgtatgaacttattctctggaaatgagtgatgccctctgctctaagtagaccatttatattaaatatcataaatgtataaaggacattcatattctta

SEQ ID NO: 62 - RNA, 2585 nt, Homo sapiens
  source 1..2585: mol_type = mRNA
gtgacctccgcagccgcagaggaggagcgcagcccggcctcgaagaacttctgcttgggtggctgaactctgatcttgacctagagtcatggccatggcaaccaaaggaggtactgtcaaagctgcttcaggattcaatgccatggaagatgcccagaccctgaggaaggccatgaaagggctcggcaccgatgaagacgccattattagcgtccttgcctaccgcaacaccgcccagcgccaggagatcaggacagcctacaagagcaccatcggcagggacttgatagacgacctgaagtcagaactgagtggcaacttcgagcagggagccggcactgatgagggctgcctaattgagatcctggcctcccggacccctgaggagatccggcgcataagccaaacctaccagcagcaatatggacggagccttgaagatgacattcgctctgacacatcgttcatgttccagcgagtgctggtgtctctgtcagctggtgggagggatgaaggaaattatctggacgatgctctcgtgagacaggatgcccaggacctgtatgaggctggagagaagaaatgggggacagatgaggtgaaatttctaactgttctctgttcccggaaccgaaatcacctgttgcatgtgtttgatgaatacaaaaggatatcacagaaggatattgaacagagtattaaatctgaaacatctggtagctttgaagatgctctgctggctatagtaaagtgcatgaggaacaaatctgcatattttgctgaaaagctctataaatcgatgaagggcttgggcaccgatgataacaccctcatcagagtgatggtttctcgagcagaaattgacatgttggatatccgggcacacttcaagagactctatggaaagtctctgtactcgttcatcaagggtgacacatctggagactacaggaaagtactgcttgttctctgtggaggagatgattaaaataaaaatcccagaaggacaggaggattctcaacactttgaatttttttaacttcatttttctacactgctattatcattatctcagaatgcttatttccaattaaaacgcctacagctgcctcctagaatatagactgtctgtattattattcacctataattagtcattatgatgctttaaagctgtacttgcatttcaaagcttataagatataaatggagattttaaagtagaaataaatatgtattccatgtttttaaaagattactttctactttgtgtttcacagacattgaatatattaaattattccatattttcttttcagtgaaaaattttttaaatggaagactgttctaaaatcacttttttccctaatccaatttttagagtggctagtagtttcttcatttgaaattgtaagcatccggtcagtaagaatgcccatccagttttctatatttcatagtcaaagccttgaaagcatctacaaatctctttttttaggttttgtccatagcatcagttgatccttactaagtttttcatgggagacttccttcatcacatcttatgttgaaatcactttctgtagtcaaagtataccaaaaccaatttatctgaactaaattctaaagtatggttatacaaaccatatacatctggttaccaaacataaatgctgaacattccatattattatagttaatgtcttaatccagcttgcaagtgaatggaaaaaaaaataagcttcaaactaggtattctgggaatgatgtaatgctctgaatttagtatgatataaagaaaacttttttgtgctaaaaatactttttaaaatcaattttgttgattgtagtaatttctatttgcactgtgcctttcaactccagaaacattctgaagatgtacttggatttaattaaaaagttcactttgtaagaacgtggaaaaataattttaatttaaaaatggtgtttttaggccgggggcgggggctcacgccagtaatcccaacactttgggaggccaaggcgggtggatcacctaaggtcaggagttcaagactagcctggccaacatggagaaactgcatctctactaaaaatataaaaattagccgggtgtggtggctggtgcctgtaatcccagccactcggaggctgagtcagggagaactgcttgaacccaggaggcaggaggcaaaggttgcagtgagccgagatcacgccagcctgggcgacagagcgagaatccatctaaaaaaaaaaaaaaaaaaagtgtctttaaagtgaggtatagtctttctctgatccacttttcaccttctgaggtttttcatcttggcccctgaaaggagctatttttgaaggacttgtgttactcagtttctacaggaattacaagataagaaaaaaaaaatcatatttagtcttatgcgtgcctactggctaatgttcacatatgccaaacactactcaataacataaaataatgtatgaacttattctctggaaatgagtgatgccctctgctctaagtagaccatttatattaaatatcataaatgtataaaggacattcatattctta

SEQ ID NO: 63 - RNA, 2686 nt, Homo sapiens
  source 1..2686: mol_type = mRNA
gtgacctccgcagccgcagaggaggagcgcagcccggcctcgaagaacttctgcttgggtggctgaactctgatcttgacctagagtcatggccatgcacaaacaacgaggaaacagaagattcaccaaacatttatgaacagccagctgttataaagacaagggaccaatctgaaaaatcagaataaagtctccttgttaaagctgctgcaagaaacaggcaccgatgaagacgccattattagcgtccttgcctaccgcaacaccgcccagcgccaggagatcaggacagcctacaagagcaccatcggcagggacttgatagacgacctgaagtcagaactgagtggcaacttcgagcaggtgattgtggggatgatgacgcccacggtgctgtatgacgtgcaagagctgcgaagggccatgaagggagccggcactgatgagggctgcctaattgagatcctggcctcccggacccctgaggagatccggcgcataagccaaacctaccagcagcaatatggacggagccttgaagatgacattcgctctgacacatcgttcatgttccagcgagtgctggtgtctctgtcagctggtgggagggatgaaggaaattatctggacgatgctctcgtgagacaggatgcccaggacctgtatgaggctggagagaagaaatgggggacagatgaggtgaaatttctaactgttctctgttcccggaaccgaaatcacctgttgcatgtgtttgatgaatacaaaaggatatcacagaaggatattgaacagagtattaaatctgaaacatctggtagctttgaagatgctctgctggctatagtaaagtgcatgaggaacaaatctgcatattttgctgaaaagctctataaatcgatgaagggcttgggcaccgatgataacaccctcatcagagtgatggtttctcgagcagaaattgacatgttggatatccgggcacacttcaagagactctatggaaagtctctgtactcgttcatcaagggtgacacatctggagactacaggaaagtactgcttgttctctgtggaggagatgattaaaataaaaatcccagaaggacaggaggattctcaacactttgaatttttttaacttcatttttctacactgctattatcattatctcagaatgcttatttccaattaaaacgcctacagctgcctcctagaatatagactgtctgtattattattcacctataattagtcattatgatgctttaaagctgtacttgcatttcaaagcttataagatataaatggagattttaaagtagaaataaatatgtattccatgtttttaaaagattactttctactttgtgtttcacagacattgaatatattaaattattccatattttcttttcagtgaaaaattttttaaatggaagactgttctaaaatcacttttttccctaatccaatttttagagtggctagtagtttcttcatttgaaattgtaagcatccggtcagtaagaatgcccatccagttttctatatttcatagtcaaagccttgaaagcatctacaaatctctttttttaggttttgtccatagcatcagttgatccttactaagtttttcatgggagacttccttcatcacatcttatgttgaaatcactttctgtagtcaaagtataccaaaaccaatttatctgaactaaattctaaagtatggttatacaaaccatatacatctggttaccaaacataaatgctgaacattccatattattatagttaatgtcttaatccagcttgcaagtgaatggaaaaaaaaataagcttcaaactaggtattctgggaatgatgtaatgctctgaatttagtatgatataaagaaaacttttttgtgctaaaaatactttttaaaatcaattttgttgattgtagtaatttctatttgcactgtgcctttcaactccagaaacattctgaagatgtacttggatttaattaaaaagttcactttgtaagaacgtggaaaaataattttaatttaaaaatggtgtttttaggccgggggcgggggctcacgccagtaatcccaacactttgggaggccaaggcgggtggatcacctaaggtcaggagttcaagactagcctggccaacatggagaaactgcatctctactaaaaatataaaaattagccgggtgtggtggctggtgcctgtaatcccagccactcggaggctgagtcagggagaactgcttgaacccaggaggcaggaggcaaaggttgcagtgagccgagatcacgccagcctgggcgacagagcgagaatccatctaaaaaaaaaaaaaaaaaaagtgtctttaaagtgaggtatagtctttctctgatccacttttcaccttctgaggtttttcatcttggcccctgaaaggagctatttttgaaggacttgtgttactcagtttctacaggaattacaagataagaaaaaaaaaatcatatttagtcttatgcgtgcctactggctaatgttcacatatgccaaacactactcaataacataaaataatgtatgaacttattctctggaaatgagtgatgccctctgctctaagtagaccatttatattaaatatcataaatgtataaaggacattcatattctta

SEQ ID NO: 64 - RNA, 1638 nt, Homo sapiens
  source 1..1638: mol_type = mRNA
agtctaggtgcagctgccggatccttcagcgtctgcatctcggcgtcgccccgcgtaccgtcgcccggctctccgccgctctcccggggtttcggggcacttgggtcccacagtctggtcctgcttcaccttcccctgacctgagtagtcgccatggcacaggttctcagaggcactgtgactgacttccctggatttgatgagcgggctgatgcagaaactcttcggaaggctatgaaaggcttgggcacagatgaggagagcatcctgactctgttgacatcccgaagtaatgctcagcgccaggaaatctctgcagcttttaagactctgtttggcagggatcttctggatgacctgaaatcagaactaactggaaaatttgaaaaattaattgtggctctgatgaaaccctctcggctttatgatgcttatgaactgaaacatgccttgaagggagctggaacaaatgaaaaagtactgacagaaattattgcttcaaggacacctgaagaactgagagccatcaaacaagtttatgaagaagaatatggctcaagcctggaagatgacgtggtgggggacacttcagggtactaccagcggatgttggtggttctccttcaggctaacagagaccctgatgctggaattgatgaagctcaagttgaacaagatgctcaggctttatttcaggctggagaacttaaatgggggacagatgaagaaaagtttatcaccatctttggaacacgaagtgtgtctcatttgagaaaggtgtttgacaagtacatgactatatcaggatttcaaattgaggaaaccattgaccgcgagacttctggcaatttagagcaactactccttgctgttgtgaaatctattcgaagtatacctgcctaccttgcagagaccctctattatgctatgaagggagctgggacagatgatcataccctcatcagagtcatggtttccaggagtgagattgatctgtttaacatcaggaaggagtttaggaagaattttgccacctctctttattccatgattaagggagatacatctggggactataagaaagctcttctgctgctctgtggagaagatgactaacgtgtcacggggaagagctccctgctgtgtgcctgcaccaccccactgccttccttcagcacctttagctgcatttgtatgccagtgcttaacacattgccttattcatactagcatgctcatgaccaacacatacacgtcatagaagaaaatagtggtgcttctttctgatctctagtggagatctctttgactgctgtagtactaaagtgtacttaatgttactaagtttaatgcctggccattttccatttatatatattttttaagaggctagagtgcttttagccttttttaaaaactccatttatattacatttgtaaccatgatactttaatcagaagcttagccttgaaattgtgaactcttggaaatgttattagtgaagttcgcaactaaactaaacctgtaaaattatgatgattgtattcaaaagattaatgaaaaataaacatttctgtccccctgaattatgtgtacatgtgtgtttagatttattattaaatttatttaacaatgtt

SEQ ID NO: 65 - RNA, 2889 nt, Homo sapiens
  source 1..2889: mol_type = mRNA
gcggttgctgctgggctaacgggctccgatccagcgagcgctgcgtcctcgagtccctgcgcccgtgcgtccgtctgcgacccgaggcctccgctgcgcgtggattctgctgcgaaccggagaccatggccaaaccagcacagggtgccaagtaccggggctccatccatgacttcccaggctttgaccccaaccaggatgccgaggctctgtacactgccatgaagggctttggcagtgacaaggaggccatactggacataatcacctcacggagcaacaggcagaggcaggaggtctgccagagctacaagtccctctacggcaaggacctcattgctgatttaaagtatgaattgacgggcaagtttgaacggttgattgtgggcctgatgaggccacctgcctattgtgatgccaaagaaattaaagatgccatctcgggcattggcactgatgagaagtgcctcattgagatcttggcttcccggaccaatgagcagatgcaccagctggtggcagcatacaaagatgcctacgagcgggacctggaggctgacatcatcggcgacacctctggccacttccagaagatgcttgtggtcctgctccagggaaccagggaggaggatgacgtagtgagcgaggacctggtacaacaggatgtccaggacctatacgaggcaggggaactgaaatggggaacagatgaagcccagttcatttacatcttgggaaatcgcagcaagcagcatcttcggttggtgttcgatgagtatctgaagaccacagggaagccgattgaagccagcatccgaggggagctgtctggggactttgagaagctaatgctggccgtagtgaagtgtatccggagcaccccggaatattttgctgaaaggctcttcaaggctatgaagggcctggggactcgggacaacaccctgatccgcatcatggtctcccgtagtgagttggacatgctcgacattcgggagatcttccggaccaagtatgagaagtccctctacagcatgatcaagaatgacacctctggcgagtacaagaagactctgctgaagctgtctgggggagatgatgatgctgctggccagttcttcccggaggcagcgcaggtggcctatcagatgtgggaacttagtgcagtggcccgagtagagctgaagggaactgtgcgcccagccaatgacttcaaccctgacgcagatgccaaagcgctgcggaaagccatgaagggactcgggactgacgaagacacaatcatcgatatcatcacgcaccgcagcaatgtccagcggcagcagatccggcagaccttcaagtctcactttggccgggacttaatgactgacctgaagtctgagatctctggagacctggcaaggctgattctggggctcatgatgccaccggcccattacgatgccaagcagttgaagaaggccatggagggagccggcacagatgaaaaggctcttattgaaatcctggccactcggaccaatgctgaaatccgggccatcaatgaggcctataaggaggactatcacaagtccctggaggatgctctgagctcagacacatctggccacttcaggaggatcctcatttctctggccacggggcatcgtgaggagggaggagaaaacctggaccaggcacgggaagatgcccaggtggctgctgagatcttggaaatagcagacacacctagtggagacaaaacttccttggagacacgtttcatgacgatcctgtgtacccggagctatccgcacctccggagagtcttccaggagttcatcaagatgaccaactatgacgtggagcacaccatcaagaaggagatgtctggggatgtcagggatgcatttgtggccattgttcaaagtgtcaagaacaagcctctcttctttgccgacaaactttacaaatccatgaagggtgctggcacagatgagaagactctgaccaggatcatggtatcccgcagtgagattgacctgctcaacatccggagggaattcattgagaaatatgacaagtctctccaccaagccattgagggtgacacctccggagacttcctgaaggccttgctggctctctgtggtggtgaggactagggccacagctttggcgggcacttctgccaagaaatggttatcagcaccagccgccatggccaagcctgattgttccagctccagagactaaggaaggggcaggggtggggggaggggttgggttgggctcttatcttcagtggagcttaggaaacgctcccactcccacgggccatcgagggcccagcacggctgagcggctgaaaaaccgtagccatagatcctgtccacctccactcccctctgaccctcaggctttcccagcttcctccccttgctacagcctctgccctggtttgggctatgtcagatccaaaaacatcctgaacctctgtctgtaaaatgagtagtgtctgtactttgaatgagggggttggtggcaggggccagttgaatgtgctgggcggggtggtgggaaggatagtaaatgtgctggggcaaactgacaaatcttcccatccatttcaccacccatctccatccaggccgcgctagagtactggaccaggaatttggatgcctgggttcaaatctgcatctgccatgcacttgtttctgaccttaggccagcccctttccctccctgagtctctattttcttatctacaatgagacagttggacaaaaaaatcttggcttcccttctaacattaacttcctaaagtatgcctccgattcattcccttgacactttttatttctaaggaagaaataaaaagagatacacaaacacataaacaca

SEQ ID NO: 66 - RNA, 2898 nt, Homo sapiens
  source 1..2898: mol_type = mRNA
atacctcagaggagccagcctctgcagacagagaccagagagcatccagaggcctggccggggtcctgcagtgcagacgttgggaggcacggagacggggagagggggaggcggtccaggactcactctgctccacctctgactccttgaagggtgccaagtaccggggctccatccatgacttcccaggctttgaccccaaccaggatgccgaggctctgtacactgccatgaagggctttggcagtgacaaggaggccatactggacataatcacctcacggagcaacaggcagaggcaggaggtctgccagagctacaagtccctctacggcaaggacctcattgctgatttaaagtatgaattgacgggcaagtttgaacggttgattgtgggcctgatgaggccacctgcctattgtgatgccaaagaaattaaagatgccatctcgggcattggcactgatgagaagtgcctcattgagatcttggcttcccggaccaatgagcagatgcaccagctggtggcagcatacaaagatgcctacgagcgggacctggaggctgacatcatcggcgacacctctggccacttccagaagatgcttgtggtcctgctccagggaaccagggaggaggatgacgtagtgagcgaggacctggtacaacaggatgtccaggacctatacgaggcaggggaactgaaatggggaacagatgaagcccagttcatttacatcttgggaaatcgcagcaagcagcatcttcggttggtgttcgatgagtatctgaagaccacagggaagccgattgaagccagcatccgaggggagctgtctggggactttgagaagctaatgctggccgtagtgaagtgtatccggagcaccccggaatattttgctgaaaggctcttcaaggctatgaagggcctggggactcgggacaacaccctgatccgcatcatggtctcccgtagtgagttggacatgctcgacattcgggagatcttccggaccaagtatgagaagtccctctacagcatgatcaagaatgacacctctggcgagtacaagaagactctgctgaagctgtctgggggagatgatgatgctgctggccagttcttcccggaggcagcgcaggtggcctatcagatgtgggaacttagtgcagtggcccgagtagagctgaagggaactgtgcgcccagccaatgacttcaaccctgacgcagatgccaaagcgctgcggaaagccatgaagggactcgggactgacgaagacacaatcatcgatatcatcacgcaccgcagcaatgtccagcggcagcagatccggcagaccttcaagtctcactttggccgggacttaatgactgacctgaagtctgagatctctggagacctggcaaggctgattctggggctcatgatgccaccggcccattacgatgccaagcagttgaagaaggccatggagggagccggcacagatgaaaaggctcttattgaaatcctggccactcggaccaatgctgaaatccgggccatcaatgaggcctataaggaggactatcacaagtccctggaggatgctctgagctcagacacatctggccacttcaggaggatcctcatttctctggccacggggcatcgtgaggagggaggagaaaacctggaccaggcacgggaagatgcccaggtggctgctgagatcttggaaatagcagacacacctagtggagacaaaacttccttggagacacgtttcatgacgatcctgtgtacccggagctatccgcacctccggagagtcttccaggagttcatcaagatgaccaactatgacgtggagcacaccatcaagaaggagatgtctggggatgtcagggatgcatttgtggccattgttcaaagtgtcaagaacaagcctctcttctttgccgacaaactttacaaatccatgaagggtgctggcacagatgagaagactctgaccaggatcatggtatcccgcagtgagattgacctgctcaacatccggagggaattcattgagaaatatgacaagtctctccaccaagccattgagggtgacacctccggagacttcctgaaggccttgctggctctctgtggtggtgaggactagggccacagctttggcgggcacttctgccaagaaatggttatcagcaccagccgccatggccaagcctgattgttccagctccagagactaaggaaggggcaggggtggggggaggggttgggttgggctcttatcttcagtggagcttaggaaacgctcccactcccacgggccatcgagggcccagcacggctgagcggctgaaaaaccgtagccatagatcctgtccacctccactcccctctgaccctcaggctttcccagcttcctccccttgctacagcctctgccctggtttgggctatgtcagatccaaaaacatcctgaacctctgtctgtaaaatgagtagtgtctgtactttgaatgagggggttggtggcaggggccagttgaatgtgctgggcggggtggtgggaaggatagtaaatgtgctggggcaaactgacaaatcttcccatccatttcaccacccatctccatccaggccgcgctagagtactggaccaggaatttggatgcctgggttcaaatctgcatctgccatgcacttgtttctgaccttaggccagcccctttccctccctgagtctctattttcttatctacaatgagacagttggacaaaaaaatcttggcttcccttctaacattaacttcctaaagtatgcctccgattcattcccttgacactttttatttctaaggaagaaataaaaagagatacacaaacacataaacaca

SEQ ID NO: 67 - RNA, 2871 nt, Homo sapiens
  source 1..2871: mol_type = mRNA
gcggttgctgctgggctaacgggctccgatccagcgagcgctgcgtcctcgagtccctgcgcccgtgcgtccgtctgcgacccgaggcctccgctgcgcgtggattctgctgcgaaccggagaccatggccaaaccagcacagggtgccaagtaccggggctccatccatgacttcccaggctttgaccccaaccaggatgccgaggctctgtacactgccatgaagggctttggcagtgacaaggaggccatactggacataatcacctcacggagcaacaggcagaggcaggaggtctgccagagctacaagtccctctacggcaaggacctcattgctgatttaaagtatgaattgacgggcaagtttgaacggttgattgtgggcctgatgaggccacctgcctattgtgatgccaaagaaattaaagatgccatctcgggcattggcactgatgagaagtgcctcattgagatcttggcttcccggaccaatgagcagatgcaccagctggtggcagcatacaaagatgcctacgagcgggacctggaggctgacatcatcggcgacacctctggccacttccagaagatgcttgtggtcctgctccagggaaccagggaggaggatgacgtagtgagcgaggacctggtacaacaggatgtccaggacctatacgaggcaggggaactgaaatggggaacagatgaagcccagttcatttacatcttgggaaatcgcagcaagcagcatcttcggttggtgttcgatgagtatctgaagaccacagggaagccgattgaagccagcatccgaggggagctgtctggggactttgagaagctaatgctggccgtagtgaagtgtatccggagcaccccggaatattttgctgaaaggctcttcaaggctatgaagggcctggggactcgggacaacaccctgatccgcatcatggtctcccgtagtgagttggacatgctcgacattcgggagatcttccggaccaagtatgagaagtccctctacagcatgatcaagaatgacacctctggcgagtacaagaagactctgctgaagctgtctgggggagatgatgatgctgctggccagttcttcccggaggcagcgcaggtggcctatcagatgtgggaacttagtgcagtggcccgagtagagctgaagggaactgtgcgcccagccaatgacttcaaccctgacgcagatgccaaagcgctgcggaaagccatgaagggactcgggactgacgaagacacaatcatcgatatcatcacgcaccgcagcaatgtccagcggcagcagatccggcagaccttcaagtctcactttggccgggacttaatgactgacctgaagtctgagatctctggagacctggcaaggctgattctggggctcatgatgccaccggcccattacgatgccaagcagttgaagaaggccatggagggagccggcacagatgaaaaggctcttattgaaatcctggccactcggaccaatgctgaaatccgggccatcaatgaggcctataaggaggactatcacaagtccctggaggatgctctgagctcagacacatctggccacttcaggaggatcctcatttctctggccacggggcatcgtgaggagggaggagaaaacctggaccaggcacgggaagatgcccaggaaatagcagacacacctagtggagacaaaacttccttggagacacgtttcatgacgatcctgtgtacccggagctatccgcacctccggagagtcttccaggagttcatcaagatgaccaactatgacgtggagcacaccatcaagaaggagatgtctggggatgtcagggatgcatttgtggccattgttcaaagtgtcaagaacaagcctctcttctttgccgacaaactttacaaatccatgaagggtgctggcacagatgagaagactctgaccaggatcatggtatcccgcagtgagattgacctgctcaacatccggagggaattcattgagaaatatgacaagtctctccaccaagccattgagggtgacacctccggagacttcctgaaggccttgctggctctctgtggtggtgaggactagggccacagctttggcgggcacttctgccaagaaatggttatcagcaccagccgccatggccaagcctgattgttccagctccagagactaaggaaggggcaggggtggggggaggggttgggttgggctcttatcttcagtggagcttaggaaacgctcccactcccacgggccatcgagggcccagcacggctgagcggctgaaaaaccgtagccatagatcctgtccacctccactcccctctgaccctcaggctttcccagcttcctccccttgctacagcctctgccctggtttgggctatgtcagatccaaaaacatcctgaacctctgtctgtaaaatgagtagtgtctgtactttgaatgagggggttggtggcaggggccagttgaatgtgctgggcggggtggtgggaaggatagtaaatgtgctggggcaaactgacaaatcttcccatccatttcaccacccatctccatccaggccgcgctagagtactggaccaggaatttggatgcctgggttcaaatctgcatctgccatgcacttgtttctgaccttaggccagcccctttccctccctgagtctctattttcttatctacaatgagacagttggacaaaaaaatcttggcttcccttctaacattaacttcctaaagtatgcctccgattcattcccttgacactttttatttctaaggaagaaataaaaagagatacacaaacacataaacaca

SEQ ID NO: 68 - RNA, 2443 nt, Homo sapiens
  source 1..2443: mol_type = mRNA
atcttgcgggagaccgggttgggctgtgacgctgctgctggggtcagaatgtcatacccaggctatcccccaacaggctacccacctttccctggatatcctcctgcaggtcaggagtcatcttttcccccttctggtcagtatccttatcctagtggctttcctccaatgggaggaggtgcctacccacaagtgccaagtagtggctacccaggagctggaggctaccctgcgcctggaggttatccagcccctggaggctatcctggtgccccacagccagggggagctccatcctatcccggagttcctccaggccaaggatttggagtcccaccaggtggagcaggcttttctgggtatccacagccaccttcacagtcttatggaggtggtccagcacaggttccactacctggtggctttcctggaggacagatgccttctcagtatcctggaggacaacctacttaccctagtcagcctgccacagtgactcaggtcactcaaggaactatccgaccagctgccaacttcgatgctataagagatgcagaaattcttcgtaaggcaatgaagggttttgggacagatgagcaggcaattgtggatgtggtggccaaccgttccaatgatcagaggcaaaaaattaaagcagcatttaagacctcctatggcaaggatttaatcaaagatctcaaatcagagttaagtggaaatatggaagaactgatcctggccctcttcatgcctcctacgtattacgatgcctggagcttacggaaagcaatgcagggagcaggaactcaggaacgtgtattgattgagattttgtgcacaagaacaaatcaggaaatccgagaaattgtcagatgttatcagtcagaatttggacgagaccttgaaaaggacattaggtcagatacatcaggacattttgaacgtttacttgtgtccatgtgccagggaaatcgtgatgagaaccagagtataaaccaccaaatggctcaggaagatgctcagcgtctctatcaagctggtgaggggagactagggaccgatgaatcttgctttaacatgatccttgccacaagaagctttcctcagctgagagctaccatggaggcttattctaggatggctaatcgagacttgttaagcagtgtgagccgtgagttttccggatatgtagaaagtggtttgaagaccatcttgcagtgtgccctgaaccgccctgccttctttgctgagaggctctactatgctatgaaaggtgctggcacagatgactccaccctggtccggattgtggtcactcgaagtgagattgaccttgtacaaataaaacagatgttcgctcagatgtatcagaagactctgggcacaatgattgcaggtgacacgagtggagattaccgaagacttcttctggctattgtgggccagtaggagggatttttttttttttaatgaaaaaaaatttctattcatagcttatccttcagagcaatgacctgcatgcagcaatatcaaacatcagctaaccgaaagagctttctgtcaaggaccgtatcagggtaatgtgcttggtttgcacatgttgttattgccttaattctaattttattttgttctctacatacaatcaatgtaaagccatatcacaatgatacagtaatattgcaatgtttgtaaaccttcattcttactagtttcattctaatcaagatgtcaaattgaataaaaatcacagcaatctctgattctgtgtaataatattgaataattttttagaaggttactgaaagctctgccttccggaatccctctaagtctgcttgatagagtggatagtgtgttaaaactgtgtactttaaaaaaaaattcaacctttacatctagaataatttgcatctcattttgcctaaattggttctgtattcataaacactttccacatagaaaatagattagtattacctgtggcaccttttaagaaagggtcaaatgtttatatgcttaagatacatagcctacttttttttcgcagttgttttctttttttaaattgagttatgacaaataaaaaattgcatatatttaaggtgtacaatatggtgttttgatatcagcattccttgtgtaatgattccacaattaaggtcaggctaattacgtatctgtcaccttgacatagttaccattttttcatgtgtggtgaaaacacttaagatctactaccttagcaaattttaagtgttcagtacattattaactatagatactgtgctctacattaaacctctagcatttattcgttttataactgaaagtttataccctttgaccaacatctccccattttccccacctctcacctggacaaccaccactgtgtttaagttcagctattttagattccacgtataaatggtatacaata

SEQ ID NO: 69 - RNA, 2509 nt, Homo sapiens
  source 1..2509: mol_type = mRNA
atcttgcgggagaccgggttgggctgtgacgctgctgctggggtcagaatgtcatacccaggctatcccccaacaggctacccacctttccctggatatcctcctgcaggtcaggagtcatcttttcccccttctggtcagtatccttatcctagtggctttcctccaatgggaggaggtgcctacccacaagtgccaagtagtggctacccaggagctggaggctaccctgcgcctggaggttatccagcccctggaggctatcctggtgccccacagccagggggagctccatcctatcccggagttcctccaggccaaggatttggagtcccaccaggtggagcaggcttttctgggtatccacagccaccttcacagtcttatggaggtggtccagcacaggttccactacctggtggctttcctggaggacagatgccttctcagtatcctggaggacaacctacttaccctagtcagatcaatacagattctttttcttcctatcctgttttctctcctgtttctttggattatagcagtgaacctgccacagtgactcaggtcactcaaggaactatccgaccagctgccaacttcgatgctataagagatgcagaaattcttcgtaaggcaatgaagggttttgggacagatgagcaggcaattgtggatgtggtggccaaccgttccaatgatcagaggcaaaaaattaaagcagcatttaagacctcctatggcaaggatttaatcaaagatctcaaatcagagttaagtggaaatatggaagaactgatcctggccctcttcatgcctcctacgtattacgatgcctggagcttacggaaagcaatgcagggagcaggaactcaggaacgtgtattgattgagattttgtgcacaagaacaaatcaggaaatccgagaaattgtcagatgttatcagtcagaatttggacgagaccttgaaaaggacattaggtcagatacatcaggacattttgaacgtttacttgtgtccatgtgccagggaaatcgtgatgagaaccagagtataaaccaccaaatggctcaggaagatgctcagcgtctctatcaagctggtgaggggagactagggaccgatgaatcttgctttaacatgatccttgccacaagaagctttcctcagctgagagctaccatggaggcttattctaggatggctaatcgagacttgttaagcagtgtgagccgtgagttttccggatatgtagaaagtggtttgaagaccatcttgcagtgtgccctgaaccgccctgccttctttgctgagaggctctactatgctatgaaaggtgctggcacagatgactccaccctggtccggattgtggtcactcgaagtgagattgaccttgtacaaataaaacagatgttcgctcagatgtatcagaagactctgggcacaatgattgcaggtgacacgagtggagattaccgaagacttcttctggctattgtgggccagtaggagggatttttttttttttaatgaaaaaaaatttctattcatagcttatccttcagagcaatgacctgcatgcagcaatatcaaacatcagctaaccgaaagagctttctgtcaaggaccgtatcagggtaatgtgcttggtttgcacatgttgttattgccttaattctaattttattttgttctctacatacaatcaatgtaaagccatatcacaatgatacagtaatattgcaatgtttgtaaaccttcattcttactagtttcattctaatcaagatgtcaaattgaataaaaatcacagcaatctctgattctgtgtaataatattgaataattttttagaaggttactgaaagctctgccttccggaatccctctaagtctgcttgatagagtggatagtgtgttaaaactgtgtactttaaaaaaaaattcaacctttacatctagaataatttgcatctcattttgcctaaattggttctgtattcataaacactttccacatagaaaatagattagtattacctgtggcaccttttaagaaagggtcaaatgtttatatgcttaagatacatagcctacttttttttcgcagttgttttctttttttaaattgagttatgacaaataaaaaattgcatatatttaaggtgtacaatatggtgttttgatatcagcattccttgtgtaatgattccacaattaaggtcaggctaattacgtatctgtcaccttgacatagttaccattttttcatgtgtggtgaaaacacttaagatctactaccttagcaaattttaagtgttcagtacattattaactatagatactgtgctctacattaaacctctagcatttattcgttttataactgaaagtttataccctttgaccaacatctccccattttccccacctctcacctggacaaccaccactgtgtttaagttcagctattttagattccacgtataaatggtatacaata

SEQ ID NO: 70 - RNA, 2454 nt, Homo sapiens
  source 1..2454: mol_type = mRNA
atcttgcgggagaccgggttgggctgtgacgctgctgctggggtcagcctgcaggtcaggagtcatcttttcccccttctggtcagtatccttatcctagtggctttcctccaatgggaggaggtgcctacccacaagtgccaagtagtggctacccaggagctggaggctaccctgcgcctggaggttatccagcccctggaggctatcctggtgccccacagccagggggagctccatcctatcccggagttcctccaggccaaggatttggagtcccaccaggtggagcaggcttttctgggtatccacagccaccttcacagtcttatggaggtggtccagcacaggttccactacctggtggctttcctggaggacagatgccttctcagtatcctggaggacaacctacttaccctagtcagatcaatacagattctttttcttcctatcctgttttctctcctgtttctttggattatagcagtgaacctgccacagtgactcaggtcactcaaggaactatccgaccagctgccaacttcgatgctataagagatgcagaaattcttcgtaaggcaatgaagggttttgggacagatgagcaggcaattgtggatgtggtggccaaccgttccaatgatcagaggcaaaaaattaaagcagcatttaagacctcctatggcaaggatttaatcaaagatctcaaatcagagttaagtggaaatatggaagaactgatcctggccctcttcatgcctcctacgtattacgatgcctggagcttacggaaagcaatgcagggagcaggaactcaggaacgtgtattgattgagattttgtgcacaagaacaaatcaggaaatccgagaaattgtcagatgttatcagtcagaatttggacgagaccttgaaaaggacattaggtcagatacatcaggacattttgaacgtttacttgtgtccatgtgccagggaaatcgtgatgagaaccagagtataaaccaccaaatggctcaggaagatgctcagcgtctctatcaagctggtgaggggagactagggaccgatgaatcttgctttaacatgatccttgccacaagaagctttcctcagctgagagctaccatggaggcttattctaggatggctaatcgagacttgttaagcagtgtgagccgtgagttttccggatatgtagaaagtggtttgaagaccatcttgcagtgtgccctgaaccgccctgccttctttgctgagaggctctactatgctatgaaaggtgctggcacagatgactccaccctggtccggattgtggtcactcgaagtgagattgaccttgtacaaataaaacagatgttcgctcagatgtatcagaagactctgggcacaatgattgcaggtgacacgagtggagattaccgaagacttcttctggctattgtgggccagtaggagggatttttttttttttaatgaaaaaaaatttctattcatagcttatccttcagagcaatgacctgcatgcagcaatatcaaacatcagctaaccgaaagagctttctgtcaaggaccgtatcagggtaatgtgcttggtttgcacatgttgttattgccttaattctaattttattttgttctctacatacaatcaatgtaaagccatatcacaatgatacagtaatattgcaatgtttgtaaaccttcattcttactagtttcattctaatcaagatgtcaaattgaataaaaatcacagcaatctctgattctgtgtaataatattgaataattttttagaaggttactgaaagctctgccttccggaatccctctaagtctgcttgatagagtggatagtgtgttaaaactgtgtactttaaaaaaaaattcaacctttacatctagaataatttgcatctcattttgcctaaattggttctgtattcataaacactttccacatagaaaatagattagtattacctgtggcaccttttaagaaagggtcaaatgtttatatgcttaagatacatagcctacttttttttcgcagttgttttctttttttaaattgagttatgacaaataaaaaattgcatatatttaaggtgtacaatatggtgttttgatatcagcattccttgtgtaatgattccacaattaaggtcaggctaattacgtatctgtcaccttgacatagttaccattttttcatgtgtggtgaaaacacttaagatctactaccttagcaaattttaagtgttcagtacattattaactatagatactgtgctctacattaaacctctagcatttattcgttttataactgaaagtttataccctttgaccaacatctccccattttccccacctctcacctggacaaccaccactgtgtttaagttcagctattttagattccacgtataaatggtatacaata

SEQ ID NO: 71 - RNA, 2388 nt, Homo sapiens
  source 1..2388: mol_type = mRNA
atcttgcgggagaccgggttgggctgtgacgctgctgctggggtcagcctgcaggtcaggagtcatcttttcccccttctggtcagtatccttatcctagtggctttcctccaatgggaggaggtgcctacccacaagtgccaagtagtggctacccaggagctggaggctaccctgcgcctggaggttatccagcccctggaggctatcctggtgccccacagccagggggagctccatcctatcccggagttcctccaggccaaggatttggagtcccaccaggtggagcaggcttttctgggtatccacagccaccttcacagtcttatggaggtggtccagcacaggttccactacctggtggctttcctggaggacagatgccttctcagtatcctggaggacaacctacttaccctagtcagcctgccacagtgactcaggtcactcaaggaactatccgaccagctgccaacttcgatgctataagagatgcagaaattcttcgtaaggcaatgaagggttttgggacagatgagcaggcaattgtggatgtggtggccaaccgttccaatgatcagaggcaaaaaattaaagcagcatttaagacctcctatggcaaggatttaatcaaagatctcaaatcagagttaagtggaaatatggaagaactgatcctggccctcttcatgcctcctacgtattacgatgcctggagcttacggaaagcaatgcagggagcaggaactcaggaacgtgtattgattgagattttgtgcacaagaacaaatcaggaaatccgagaaattgtcagatgttatcagtcagaatttggacgagaccttgaaaaggacattaggtcagatacatcaggacattttgaacgtttacttgtgtccatgtgccagggaaatcgtgatgagaaccagagtataaaccaccaaatggctcaggaagatgctcagcgtctctatcaagctggtgaggggagactagggaccgatgaatcttgctttaacatgatccttgccacaagaagctttcctcagctgagagctaccatggaggcttattctaggatggctaatcgagacttgttaagcagtgtgagccgtgagttttccggatatgtagaaagtggtttgaagaccatcttgcagtgtgccctgaaccgccctgccttctttgctgagaggctctactatgctatgaaaggtgctggcacagatgactccaccctggtccggattgtggtcactcgaagtgagattgaccttgtacaaataaaacagatgttcgctcagatgtatcagaagactctgggcacaatgattgcaggtgacacgagtggagattaccgaagacttcttctggctattgtgggccagtaggagggatttttttttttttaatgaaaaaaaatttctattcatagcttatccttcagagcaatgacctgcatgcagcaatatcaaacatcagctaaccgaaagagctttctgtcaaggaccgtatcagggtaatgtgcttggtttgcacatgttgttattgccttaattctaattttattttgttctctacatacaatcaatgtaaagccatatcacaatgatacagtaatattgcaatgtttgtaaaccttcattcttactagtttcattctaatcaagatgtcaaattgaataaaaatcacagcaatctctgattctgtgtaataatattgaataattttttagaaggttactgaaagctctgccttccggaatccctctaagtctgcttgatagagtggatagtgtgttaaaactgtgtactttaaaaaaaaattcaacctttacatctagaataatttgcatctcattttgcctaaattggttctgtattcataaacactttccacatagaaaatagattagtattacctgtggcaccttttaagaaagggtcaaatgtttatatgcttaagatacatagcctacttttttttcgcagttgttttctttttttaaattgagttatgacaaataaaaaattgcatatatttaaggtgtacaatatggtgttttgatatcagcattccttgtgtaatgattccacaattaaggtcaggctaattacgtatctgtcaccttgacatagttaccattttttcatgtgtggtgaaaacacttaagatctactaccttagcaaattttaagtgttcagtacattattaactatagatactgtgctctacattaaacctctagcatttattcgttttataactgaaagtttataccctttgaccaacatctccccattttccccacctctcacctggacaaccaccactgtgtttaagttcagctattttagattccacgtataaatggtatacaata

SEQ ID NO: 72 - RNA, 2134 nt, Homo sapiens
  source 1..2134: mol_type = mRNA
agagcccgggggcgaggggacggcaggcaggtgtggcgctgccctgggcgggcttgcacccccacacccaagtgagcggcctgctcactcctcagctgcaggagccagacgtgtggagtcccagcagaggccaacctgtgtctcttcatctccctgggaaaggtgcccccgaggtgaaagagatggcctggtggaaatcctggattgaacaggagggtgtcacagtgaagagcagctcccacttcaacccagaccctgatgcagagaccctctacaaagccatgaaggggatcggtgtcgggtcccaactgctcagccaccaagcagctgccttcgccttcccctcctccgccctcaccagtgtgtcaccctgggggcagcagggtcacttgtgctgtaaccctgcagggaccaacgagcaggctatcatcgatgtgctcaccaagagaagcaacacgcagcggcagcagatcgccaagtccttcaaggctcagttcggcaaggacctcactgagaccttgaagtctgagctcagtggcaagtttgagaggctcattgtggcccttatgtacccgccatacagatacgaagccaaggagctgcatgacgccatgaagggcttaggaaccaaggagggtgtcatcattgagatcctggcctctcggaccaagaaccagctgcgggagataatgaaggcgtatgaggaagactatgggtccagcctggaggaggacatccaagcagacacaagtggctacctggagaggatcctggtgtgcctcctgcagggcagcagggatgatgtgagcagctttgtggacccaggactggccctccaagacgcacaggatctgtatgcggcaggcgagaagattcgtgggactgatgagatgaaattcatcaccatcctgtgcacgcgcagtgccactcacctgctgagagtgtttgaagagtatgagaaaattgccaacaagagcattgaggacagcatcaagagtgagacccatggctcactggaggaggccatgctcactgtggtgaaatgcacccaaaacctccacagctactttgcagagagactctactatgccatgaagggagcagggacgcgtgatgggaccctgataagaaacatcgtttcaaggagcgagattgacttaaatcttatcaaatgtcacttcaagaagatgtacggcaagaccctcagcagcatgatcatggaagacaccagcggtgactacaagaacgccctgctgagcctggtgggcagcgacccctgaggcacagaagaacaagagcaaagaccatgaagccagagtctccaggactcctcactcaacctcggccatggacgcaggttgggtgtgaggggggtcccagcctttcggtcttctatttccctatttccagtgctttccagccgggtttctgacccagagggtggaaccggcctggactcctcttcccaacttcctccaggtcatttcccagtgtgagcacaatgccaaccttagtgtttctccagccagacagatgcctcagcatgaagggcttggggacttgtggatcattccttcctccctgcaggagcttcccaagctggtcacagagtctcctgggcacaggttatacagaccccagccccattcccatctactgaaacagggtctccacaagaggggccagggaatatgggtttttaacaagcgtcttacaaaacacttctctatcatgcagccggagagctggctgggagcccttttgttttagaacacacatccttcagcagctgagaaacgaacacgaatccatcccaaccgagatgccattaacattcatctaaaaatgttaggctctaaatggacgaaaaattctctcgccatcttaataacaaaataaactacaaattcctgacccaaggacactgtgttataagaggcgtgggctcccctggtggctgaccaggtcagctgccctggccttgcacccctctgcatgcagcacagaagggtgtgaccatgccctcagcaccactcttgtccccactgaacggcaactgagactgggtacctggagattctgaagtgcctttgctgtggttttcaaaataataaagatttgtattcaactcaaa

SEQ ID NO: 73 - RNA, 2020 nt, Homo sapiens
  source 1..2020: mol_type = mRNA
agagcccgggggcgaggggacggcaggcaggtgtggcgctgccctgggcgggcttgcacccccacacccaagtgagcggcctgctcactcctcagctgcaggagccagacgtgtggagtcccagcagaggccaacctgtgtctcttcatctccctgggaaaggtgcccccgaggtgaaagagatggcctggtggaaatcctggattgaacaggagggtgtcacagtgaagagcagctcccacttcaacccagaccctgatgcagagaccctctacaaagccatgaaggggatcgggaccaacgagcaggctatcatcgatgtgctcaccaagagaagcaacacgcagcggcagcagatcgccaagtccttcaaggctcagttcggcaaggacctcactgagaccttgaagtctgagctcagtggcaagtttgagaggctcattgtggcccttatgtacccgccatacagatacgaagccaaggagctgcatgacgccatgaagggcttaggaaccaaggagggtgtcatcattgagatcctggcctctcggaccaagaaccagctgcgggagataatgaaggcgtatgaggaagactatgggtccagcctggaggaggacatccaagcagacacaagtggctacctggagaggatcctggtgtgcctcctgcagggcagcagggatgatgtgagcagctttgtggacccaggactggccctccaagacgcacaggatctgtatgcggcaggcgagaagattcgtgggactgatgagatgaaattcatcaccatcctgtgcacgcgcagtgccactcacctgctgagagtgtttgaagagtatgagaaaattgccaacaagagcattgaggacagcatcaagagtgagacccatggctcactggaggaggccatgctcactgtggtgaaatgcacccaaaacctccacagctactttgcagagagactctactatgccatgaagggagcagggacgcgtgatgggaccctgataagaaacatcgtttcaaggagcgagattgacttaaatcttatcaaatgtcacttcaagaagatgtacggcaagaccctcagcagcatgatcatggaagacaccagcggtgactacaagaacgccctgctgagcctggtgggcagcgacccctgaggcacagaagaacaagagcaaagaccatgaagccagagtctccaggactcctcactcaacctcggccatggacgcaggttgggtgtgaggggggtcccagcctttcggtcttctatttccctatttccagtgctttccagccgggtttctgacccagagggtggaaccggcctggactcctcttcccaacttcctccaggtcatttcccagtgtgagcacaatgccaaccttagtgtttctccagccagacagatgcctcagcatgaagggcttggggacttgtggatcattccttcctccctgcaggagcttcccaagctggtcacagagtctcctgggcacaggttatacagaccccagccccattcccatctactgaaacagggtctccacaagaggggccagggaatatgggtttttaacaagcgtcttacaaaacacttctctatcatgcagccggagagctggctgggagcccttttgttttagaacacacatccttcagcagctgagaaacgaacacgaatccatcccaaccgagatgccattaacattcatctaaaaatgttaggctctaaatggacgaaaaattctctcgccatcttaataacaaaataaactacaaattcctgacccaaggacactgtgttataagaggcgtgggctcccctggtggctgaccaggtcagctgccctggccttgcacccctctgcatgcagcacagaagggtgtgaccatgccctcagcaccactcttgtccccactgaacggcaactgagactgggtacctggagattctgaagtgcctttgctgtggttttcaaaataataaagatttgtattcaactcaaa

SEQ ID NO: 74 - RNA, 1834 nt, Homo sapiens
  source 1..1834: mol_type = mRNA
agagcccgggggcgaggggacggcaggcaggtgtggcgctgccctgggcgggcttgcacccccacacccaagtgagcggcctgctcactcctcagctgcaggagccagacgtgtggagtcccagcagaggccaacctgtgtctcttcatctccctgggaaaggtgcccccgaggtgaaagagatggcctggtggaaatcctgggacctcactgagaccttgaagtctgagctcagtggcaagtttgagaggctcattgtggcccttatgtacccgccatacagatacgaagccaaggagctgcatgacgccatgaagggcttaggaaccaaggagggtgtcatcattgagatcctggcctctcggaccaagaaccagctgcgggagataatgaaggcgtatgaggaagactatgggtccagcctggaggaggacatccaagcagacacaagtggctacctggagaggatcctggtgtgcctcctgcagggcagcagggatgatgtgagcagctttgtggacccaggactggccctccaagacgcacaggatctgtatgcggcaggcgagaagattcgtgggactgatgagatgaaattcatcaccatcctgtgcacgcgcagtgccactcacctgctgagagtgtttgaagagtatgagaaaattgccaacaagagcattgaggacagcatcaagagtgagacccatggctcactggaggaggccatgctcactgtggtgaaatgcacccaaaacctccacagctactttgcagagagactctactatgccatgaagggagcagggacgcgtgatgggaccctgataagaaacatcgtttcaaggagcgagattgacttaaatcttatcaaatgtcacttcaagaagatgtacggcaagaccctcagcagcatgatcatggaagacaccagcggtgactacaagaacgccctgctgagcctggtgggcagcgacccctgaggcacagaagaacaagagcaaagaccatgaagccagagtctccaggactcctcactcaacctcggccatggacgcaggttgggtgtgaggggggtcccagcctttcggtcttctatttccctatttccagtgctttccagccgggtttctgacccagagggtggaaccggcctggactcctcttcccaacttcctccaggtcatttcccagtgtgagcacaatgccaaccttagtgtttctccagccagacagatgcctcagcatgaagggcttggggacttgtggatcattccttcctccctgcaggagcttcccaagctggtcacagagtctcctgggcacaggttatacagaccccagccccattcccatctactgaaacagggtctccacaagaggggccagggaatatgggtttttaacaagcgtcttacaaaacacttctctatcatgcagccggagagctggctgggagcccttttgttttagaacacacatccttcagcagctgagaaacgaacacgaatccatcccaaccgagatgccattaacattcatctaaaaatgttaggctctaaatggacgaaaaattctctcgccatcttaataacaaaataaactacaaattcctgacccaaggacactgtgttataagaggcgtgggctcccctggtggctgaccaggtcagctgccctggccttgcacccctctgcatgcagcacagaagggtgtgaccatgccctcagcaccactcttgtccccactgaacggcaactgagactgggtacctggagattctgaagtgcctttgctgtggttttcaaaataataaagatttgtattcaactcaaa

SEQ ID NO: 75 - RNA, 1908 nt, Homo sapiens
  source 1..1908: mol_type = mRNA
agacgtgtggagtcccagcagaggccaacctgtgtctcttcatctccgtgagaaaggtgcccccgaagtgaaagagatggcctggtggaaagcctggattgaacaggagggtgtcacagtgaagagcagctcccacttcaacccagaccctgatgcagagaccctctacaaagccatgaaggggatcgggaccaacgagcaggctatcatcgatgtgctcaccaagagaagcaacacgcagcggcagcagatcgccaagtccttcaaggctcagttcggcaaggacctcactgagaccttgaagtctgagctcagtggcaagtttgagaggctcattgtggcccttatgtatccgccatacagatacgaagccaaggagctgcatgacgccatgaagggcttaggaaccaaggagggtgtcatcattgagatcctggcctctcggaccaagaaccagctgcgggagataatgaaggcgtatgaggaagactatgggtccagcctggaggaggacatccaagcagacacaagtggctacctggagaggatcctggtgtgcctcctgcagggcagcagggatgatgtgagcagctttgtggacccggcactggccctccaagacgcacaggatctgtatgcggcaggcgagaagattcgtgggactgatgagatgaaattcatcaccatcctgtgcacgcgcagtgccactcacctgctgagagtgtttgaagagtatgagaaaattgccaacaagagcattgaggacagcatcaagagtgagacccatggctcactggaggaggccatgctcactgtggtgaaatgcacccaaaacctccacagctactttgcagagagactctactatgccatgaagggagcagggacgcgtgatgggaccctgataagaaacatcgtttcaaggagcgagattgacttaaatcttatcaaatgtcacttcaagaagatgtacggcaagaccctcagcagcatgatcatggaagacaccagcggcgactacaagaacgccctgctgagcctggtgggcagcgacccctgaggcacagaagaacaagagcaaagaccatgaagccagagtctccaggactcctcactcaacctcggccatggacgcaggttgggtgtgaggggggtcccagcctttcggtcttctatttccctatttccagtgctttccagccgggtttctgacccagagggtggaaccggcctggactcctcttcccaacttcctccaggtcatttcccagtgtgagcacaatgccaaccttagtgtttctccagccagacagatgcctcagcatgaagggcttggggacttgtggatcattccttcctccctgcaggagcttcccaagctggtcacagagtctcctgggcacaggttatacagaccccagccccattcccatctactgaaacagggtctccacaagaggggccagggaatatgggtttttaacaagcgtcttacaaaacacttctctatcatgcagccggagagctggctgggagcccttttgttttagaacacacatccttcagcagctgagaaatgaacacgaatccatcccaaccgagatgccattaacattcatctaaaaatgttaggctctaaatggacgaaaaattctctcgccatcttaataacaaaataaactacaaattcctgacccaaggacactgtgttataagaggcgtgggctcccctggtggctgaccaggtcagctgccctggccttgcacccctctgcatgcagcacagaagggtgtgaccatgccctcagcaccactcttgtccccactgaacggcaactgagactgggtacctggagattctgaagtgcctttgctgtggttttcaaaataataaagatttgtattcaa

SEQ ID NO: 76 - RNA, 1755 nt, Homo sapiens
  source 1..1755: mol_type = mRNA
agacgtgtggagtcccagcagaggccaacctgtgtctcttcatctccgtgagaaaggtgcccccgaagtgaaagagatggcctggtggaaagcctggattgaacaggagggtgtcacagtgaagagcagctcccacttcaacccagaccctgatgcagagaccctctacaaagccatgaaggggatcggtgtcgggtcccaactgctcagccaccaagcagctgccttcgccttcccctcctccgccctcaccagtgtgtcaccctgggggcagcagggtcacttgtgctgtaaccctgcagggaccaacgagcaggctatcatcgatgtgctcaccaagagaagcaacacgcagcggcagcagatcgccaagtccttcaaggctcagttcggcaaggacctcactgagaccttgaagtctgagctcagtggcaagtttgagaggctcattgtggcccttatgtatccgccatacagatacgaagccaaggagctgcatgacgccatgaagggcagcagggatgatgtgagcagctttgtggacccggcactggccctccaagacgcacaggatctgtatgcggcaggcgagaagattcgtgggactgatgagatgaaattcatcaccatcctgtgcacgcgcagtgccactcacctgctgagagtgaaatgcacccaaaacctccacagctactttgcagagagactctactatgccatgaagggagcagggacgcgtgatgggaccctgataagaaacatcgtttcaaggagcgagattgacttaaatcttatcaaatgtcacttcaagaagatgtacggcaagaccctcagcagcatgatcatggaagacaccagcggcgactacaagaacgccctgctgagcctggtgggcagcgacccctgaggcacagaagaacaagagcaaagaccatgaagccagagtctccaggactcctcactcaacctcggccatggacgcaggttgggtgtgaggggggtcccagcctttcggtcttctatttccctatttccagtgctttccagccgggtttctgacccagagggtggaaccggcctggactcctcttcccaacttcctccaggtcatttcccagtgtgagcacaatgccaaccttagtgtttctccagccagacagatgcctcagcatgaagggcttggggacttgtggatcattccttcctccctgcaggagcttcccaagctggtcacagagtctcctgggcacaggttatacagaccccagccccattcccatctactgaaacagggtctccacaagaggggccagggaatatgggtttttaacaagcgtcttacaaaacacttctctatcatgcagccggagagctggctgggagcccttttgttttagaacacacatccttcagcagctgagaaatgaacacgaatccatcccaaccgagatgccattaacattcatctaaaaatgttaggctctaaatggacgaaaaattctctcgccatcttaataacaaaataaactacaaattcctgacccaaggacactgtgttataagaggcgtgggctcccctggtggctgaccaggtcagctgccctggccttgcacccctctgcatgcagcacagaagggtgtgaccatgccctcagcaccactcttgtccccactgaacggcaactgagactgggtacctggagattctgaagtgcctttgctgtggttttcaaaataataaagatttgtattcaa

SEQ ID NO: 77 - RNA, 1737 nt, Homo sapiens
  source 1..1737: mol_type = mRNA
agacgtgtggagtcccagcagaggccaacctgtgtctcttcatctccgtgagaaaggtgcccccgaagtgaaagagatggcctggtggaaagcctggattgaacaggagggtgtcacagtgaagagcagctcccacttcaacccagaccctgatgcagagaccctctacaaagccatgaaggggatcgggaccaacgagcaggctatcatcgatgtgctcaccaagagaagcaacacgcagcggcagcagatcgccaagtccttcaaggctcagttcggcaaggacctcactgagaccttgaagtctgagctcagtggcaagtttgagaggctcattgtggcccttatgtatccgccatacagatacgaagccaaggagctgcatgacgccatgaagggcagcagggatgatgtgagcagctttgtggacccggcactggccctccaagacgcacaggatctgtatgcggcaggcgagaagattcgtgggactgatgagatgaaattcatcaccatcctgtgcacgcgcagtgccactcacctgctgagagtgtttgaagagtatgagaaaattgccaacaagagcattgaggacagcatcaagagtgagacccatggctcactggaggaggccatgctcactgtggtgaaatgcacccaaaacctccacagctactttgcagagagactctactatgccatgaagggagcagggacgcgtgatgggaccctgataagaaacatcgtttcaaggagcgagattgacttaaatcttatcaaatgtcacttcaagaagatgtacggcaagaccctcagcagcatgatcatggaagacaccagcggcgactacaagaacgccctgctgagcctggtgggcagcgacccctgaggcacagaagaacaagagcaaagaccatgaagccagagtctccaggactcctcactcaacctcggccatggacgcaggttgggtgtgaggggggtcccagcctttcggtcttctatttccctatttccagtgctttccagccgggtttctgacccagagggtggaaccggcctggactcctcttcccaacttcctccaggtcatttcccagtgtgagcacaatgccaaccttagtgtttctccagccagacagatgcctcagcatgaagggcttggggacttgtggatcattccttcctccctgcaggagcttcccaagctggtcacagagtctcctgggcacaggttatacagaccccagccccattcccatctactgaaacagggtctccacaagaggggccagggaatatgggtttttaacaagcgtcttacaaaacacttctctatcatgcagccggagagctggctgggagcccttttgttttagaacacacatccttcagcagctgagaaatgaacacgaatccatcccaaccgagatgccattaacattcatctaaaaatgttaggctctaaatggacgaaaaattctctcgccatcttaataacaaaataaactacaaattcctgacccaaggacactgtgttataagaggcgtgggctcccctggtggctgaccaggtcagctgccctggccttgcacccctctgcatgcagcacagaagggtgtgaccatgccctcagcaccactcttgtccccactgaacggcaactgagactgggtacctggagattctgaagtgcctttgctgtggttttcaaaataataaagatttgtattcaa

SEQ ID NO: 78 - RNA, 1551 nt, Homo sapiens
  source 1..1551: mol_type = mRNA
ctctaccaggccacaccggaggcagtgctcacacaggcaagctaccaggccacaacaacgacacccacctcacctctggcacctctgagcatccacgtacttgcaagaactcttgctcacatcagctaagagattgcacctgctgacctagagattccggcctgtgctcctgtgctgctgagcagggcaaccagtagcaccatgtctgtgactggcgggaagatggcaccgtccctcacccaggagatcctcagccacctgggcctggccagcaagactgcagcgtgggggaccctgggcaccctcaggaccttcttgaacttcagcgtggacaaggatgcgcagaggctactgagggccattactggccaaggcgtggaccgcagtgccattgtggacgtgctgaccaaccggagcagagagcaaaggcagctcatctcacgaaacttccaggagcgcacccaacaggacctgatgaagtctctacaggcagcactttccggcaacctggagaggattgtgatggctctgctgcagcccacagcccagtttgacgcccaggaattgaggacagctctgaaggcctcagattctgctgtggacgtggccattgaaattcttgccactcgaaccccaccccagctgcaggagtgcctggcagtctacaaacacaatttccaggtggaggctgtggatgacatcacatctgagaccagtggcatcttgcaggacctgctgttggccctggccaaggggggccgtgacagctactctggaatcattgactataatctggcagaacaagatgtccaggcactgcagcgggcagaaggacctagcagagaggaaacatgggtcccagtcttcacccagcgaaatcctgaacacctcatccgagtgtttgatcagtaccagcggagcactgggcaagagctggaggaggctgtccagaaccgtttccatggagatgctcaggtggctctgctcggcctagcttcggtgatcaagaacacaccgctgtactttgctgacaaacttcatcaagccctccaggaaactgagcccaattaccaagtcctgattcgcatccttatctctcgatgtgagactgaccttctgagtatcagagctgagttcaggaagaaatttgggaagtccctctactcttctctccaggatgcagtgaaaggggattgccagtcagccctcctggccttgtgcagggctgaagacatgtgagacttccctgccccaccccacatgacatccgaggatctgagatttccgtgtttggctgaacctgggagaccagctgggcctccaagtaggataacccctcactgagcaccacattctctagcttcttgttgaggctggaactgtttctttaaaatcccttaattttcccatctcaaaattatatctgtacctgggtcatccagctccttcttgggtgtggggaaatgagttttctttgatagtttctgcctcactcatccctcctgtaccctggccagaacatctcactgatactcgaattcttttggcaaa

SEQ ID NO: 79 - RNA, 1441 nt, Homo sapiens
  source 1..1441: mol_type = mRNA
atccagatttgcttttacattttcttgcctgagtctgaggtgaacagtgaacatatttacatttgatttaacagtgaaccttaattctttctggcttcacagtgaaacaagtttatgcaatcgatcaaatattttcatccctgaggttaacaattaccatcaaaatgttttgtggagactatgtgcaaggaaccatcttcccagctcccaatttcaatcccataatggatgcccaaatgctaggaggagcactccaaggatttgactgtgacaaagacatgctgatcaacattctgactcagcgctgcaatgcacaaaggatgatgattgcagaggcataccagagcatgtatggccgggacctgattggggatatgagggagcagctttcggatcacttcaaagatgtgatggctggcctcatgtacccaccaccactgtatgatgctcatgagctctggcatgccatgaagggagtaggcactgatgagaattgcctcattgaaatactagcttcaagaacaaatggagaaattttccagatgcgagaagcctactgcttgcaatacagcaataacctccaagaggacatttattcagagacctcaggacacttcagagatactctcatgaacttggtccaggggaccagagaggaaggatatacagaccctgcgatggctgctcaggatgcaatggtcctatgggaagcctgtcagcagaagacgggggagcacaaaaccatgctgcaaatgatcctgtgcaacaagagctaccagcagctgcggctggttttccaggaatttcaaaatatttctgggcaagatatggtagatgccattaatgaatgttatgatggatactttcaggagctgctggttgcaattgttctctgtgttcgagacaaaccagcctattttgcttatagattatatagtgcaattcatgactttggtttccataataaaactgtaatcaggattctcattgccagaagtgaaatagacctgctgaccataaggaaacgatacaaagagcgatatggaaaatccctatttcatgatatcagaaattttgcttcagggcattataagaaagcactgcttgccatctgtgctggtgatgctgaggactactaaaatgaagaggacttggagtactgtgcactcctctttctagacacttccaaatagagattttctcacaaatttgtactgttcatggcactattaacaaaactatacaatcatattttctcttctatctttgaaattattctaagccaaagaaaactatgaatgaaagtatatgatactgaatttgcctactatcctgaatttgcctactatctaatcagcaattaaataaattgtgcatgatggaataatagaaaaattgcattggaatagattttatttaaatgtgaaccatcaacaaccta

SEQ ID NO: 80 - RNA, 6685 nt, Homo sapiens
  source 1..6685: mol_type = mRNA
ggagttttccgcccggcgctgacggctgctgcgcccgcggctccccagtgccccgagtgccccgcgggccccgcgagcgggagtgggacccagcccctaggcagaacccaggcgccgcgcccgggacgcccgcggagagagccactcccgcccacgtcccatttcgcccctcgcgtccggagtccccgtggccagatctaaccatgagctaccctggctatcccccgcccccaggtggctacccaccagctgcaccaggtggtggtccctggggaggtgctgcctaccctcctccgcccagcatgccccccatcgggctggataacgtggccacctatgcggggcagttcaaccaggactatctctcgggaatggcggccaacatgtctgggacatttggaggagccaacatgcccaacctgtaccctggggcccctggggctggctacccaccagtgccccctggcggctttgggcagcccccctctgcccagcagcctgttcctccctatgggatgtatccacccccaggaggaaacccaccctccaggatgccctcatatccgccatacccaggggcccctgtgccgggccagcccatgccaccccccggacagcagcccccaggggcctaccctgggcagccaccagtgacctaccctggtcagcctccagtgccactccctgggcagcagcagccagtgccgagctacccaggatacccggggtctgggactgtcacccccgctgtgcccccaacccagtttggaagccgaggcaccatcactgatgctcccggctttgaccccctgcgagatgccgaggtcctgcggaaggccatgaaaggcttcgggacggatgagcaggccatcattgactgcctggggagtcgctccaacaagcagcggcagcagatcctactttccttcaagacggcttacggcaaggatttgatcaaagatctgaaatctgaactgtcaggaaactttgagaagacaatcttggctctgatgaagaccccagtcctctttgacatttatgagataaaggaagccatcaagggggttggcactgatgaagcctgcctgattgagatcctcgcttcccgcagcaatgagcacatccgagaattaaacagagcctacaaagcagaattcaaaaagaccctggaagaggccattcgaagcgacacatcagggcacttccagcggctcctcatctctctctctcagggaaaccgtgatgaaagcacaaacgtggacatgtcactcgcccagagagatgcccaggagctgtatgcggccggggagaaccgcctgggaacagacgagtccaagttcaatgcggttctgtgctcccggagccgggcccacctggtagcagttttcaatgagtaccagagaatgacaggccgggacattgagaagagcatctgccgggagatgtccggggacctggaggagggcatgctggccgtggtgaaatgtctcaagaataccccagccttctttgcggagaggctcaacaaggccatgaggggggcaggaacaaaggaccggaccctgattcgcatcatggtgtctcgcagcgagaccgacctcctggacatcagatcagagtataagcggatgtacggcaagtcgctgtaccacgacatctcgggagatacttcaggggattaccggaagattctgctgaagatctgtggtggcaatgactgaacagtgactggtggctcacttctgcccacctgccggcaacaccagtgccaggaaaaggccaaaagaatgtctgtttctaacaaatccacaaatagccccgagattcaccgtcctagagcttaggcctgtcttccacccctcctgacccgtatagtgtgccacaggacctgggtcggtctagaactctctcaggatgccttttctaccccatccctcacagcctcttgctgctaaaatagatgtttcatttttctgactcatgcaatcattcccctttgcctgtggctaagacttggcttcatttcgtcatgtaattgtatatttttatttggaggcatattttcttttcttacagtcattgccagacagaggcatacaagtctgtttgctgcatacacatttctggtgagggcgactgggtgggtgaagcaccgtgtcctcgctgaggagagaaagggaggcgtgcctgagaaggtagcctgtgcatctggtgagtgtgtcacgagctttgttactgccaaactcactcctttttagaaaaaacaaaaaaaaagggccagaaagtcattccttccatcttccttgcagaaaccacgagaacaaagccagttccctgtcagtgacagggcttcttgtaatttgtggtatgtgccttaaacctgaatgtctgtagccaaaacttgtttccacattaagagtcagccagctctggaatggtctggaaatgtcttcctggtaccaacttgttttcttctgcttgattctgccctgtggctcagaggtctggccttatcagccagtgaaagttcatgtaaccttacgtagagatttgtgtgcaggaaaccctgagcatacactagtttgcagggactcgtaaggacatgggaagggaggttcccgaaatccaggcaggaggcccagacacctgaaaggcaaagggatcttggttggttgcaggtgcagtgaagtccactgaaggtgtggtgcgaagaatgcagtccttcacccaggtcccaggagggaagaagggtgtgtgctaattcctggtgcccctcggcgggggccagagagaaggatggggacaacccagagagtcacaagaccagtgcctcccctcagggtgcctccaggctgaaaggggctcctggctctggtctctggggaccctgtgcccgttggttggtggtgtgagggaagagaatccataagagagtttctgagaattatggtgtcatgtccagaagctagagcttaccttgcatcaggggtctccacccactccttttccaacctcctgcgttgaggtttagaaaagagagaatcgactaggcactatggctcacgcctgtaatccaaggactttgggaagctgaggtgagaggatcacttgagctcaggagttcaagactagcctagccaacagcgagacccctgtctctactaaaaaatttggccaggcgtggtggctcacggctgtaatcccagcactttgggaggtgaggcgggcagatcacctgaggtcaggagttcgagacccagcctggccaacatggtgaaaccccatctctactaaaaatacaaaaattagccaggcatggtggcacattcctgtaatcccagctacacaggatgctgaggcaggagaatcacttgaacccaggaggcagaggttgtagtgagctgagatcacaccattgcacttcaacctgggtggacagagtgagactctgtctcaaaaaaaaaaaaaaatttacctggcattgtagtgcattccctatagtcggctactctggaggctgaggcaggaagatccttagagcccaagaaattgaggccgtagtaagctgtgattacaccactgcactccagcctggacaacagagcgagaccttgtctcaaatgagaaaaaaacaaaaagaaatgggagaatccagagagactaggctagatcaagcctgctgggtcctggcaggagccccagggagtagctcatctgcagacatttgcttgaggactaccccctaaacataaaggaagaatgacatccgaagggtgtggagcagccatgagctgagaactagcctggtctacctgagattgatggcaggtcctggtcaacacgtcagctctgcgtcagagtccatgcctcaagcccaagctgaagccccatccctgctgctctcccaagaactcctctgctagggcaggccccttgcccttgggtgccaggtgggacctgcctgatgggatggggtgcttggcatatacaacttgccatgaactcaaggtgaccctgggggcctcctgaattgtgatggggcctagaaccaatgtgctctgatgtgaccatattctgtgacattaccttgccctgtttactccaaagttcccagcctggtgcccagcaggcaatattgcacctacagacacatttactttggtttccaaagtgtttttagacatttgaatttgttgccaacatttaaacattgagagatttcatatttttaaaaatctggaattctggcttctcttgaaaactcagaaattctggcactatggggcttgcattcctgcatggctggagctgagttgcagctgcccctttaggcctgtactccttatttgctataggctccgtcttgtattacactaagcccatgtcacccatttggctcctgcaggcctttgggtttgagaccctggtctacacacttggagaccacctgttgtaaagtacatggatgtgctttggtcaaggaatagaccaaggtggatatccaggccagagtgactcagcgagtttaggtcacaggcgtatactccacttgttatataacctgcttgtgtaagttcatacttggctcaaagccactattgtttggaaaaggtataactgccctgctgacgctgtacagatgttcttgggctcggatgggcatggctccacgtggtgtgcactagcacccagagagagtgaagctattgacccctgtaagggagagtgaccatctggcagatagatagaggggagccaggacatggctcagcttgtgcccagagggagagttaagccgctgaccctgtagccagggagtgcacctgcaagcatgggggtggcaggagccacagagctggctgctgagaggagctgcagatctggagaagacagcctaggtaaaggtggacagtgtgagagctgctgatgagatagctgctgaataaaactacattttacctgcctatggcccgccaggttttctttcagctatcgcccatccacccagtcccctcgaacctcagcatgggctggaacctgaccctgggcatgacatttggcatagttgtggacctgacacctgtgtttgtcctagtcctgtttctccctgccttcctgttcctctcgctgccctcatggtcactcccaagagatccaacccatgttaagtatgggctggaggactgcatgaatgcctcatgatcttcccagaggcaaaggcacctactgccttccaaggtcagtgggaggttgggatcaacactgtttattatgcttaggacaaaaaagatagggagaaagatgtgcaaccttacaggtcatctttctgggatagaacacaatgggtcttctcctgcctcctggatatgttagtcaaggccagtccatgctacacatctagtctgacttctaaaatagaagcaccagatgaattcagccctgagagaattttcagcagctgtgggggcgctggaggaaacactattaaatagttttgcacctgagacagatagcctcactcgcctcaccctagtcctggtggcatttgtctcaggtgcaaaatttaagaaagaaaccttggagtgctcaccctgtggctgggtagatggtcctaaagtggtggttttcaagcctgagtgtgtatcaggatcatcaggggagcttgctaaagagcagttcctgcggtcagaccctcatgcattttgagcaggtgtggggactgggaaactgcatctgtaacctgctgtaatctaacgcttatctaaatactactgtgctcacacagagaacaccgcaaaagtagaggtgttcctccagagggcaggtgagcagatggcacagtctgcttggaattcagtcaggtgatgagagatgagatgaggcactcctagctttgggaagagggagctgaaagatgaacctttgcaggtgcccacggtcaaagtggtggtttaatgccatgccatgcccattttctgttggccttggcagggagttacagccctaccttaggacctggctccttatttctgctgtaggctctttcctgccctggccgagatggagtggaatgagacctagaaacatcaagctaaatacatgtcctcagaaagataaaggtttacattttcacccccatcaaatctgaaagctctctgcctgtgtttttctaagggatagggacatcattactcagtccacaacctggactcatgtagggtcccctgtcagtaaaggagtcagtcaagcccaccaggtataccaaggactcttaccctcagcccctactccttggaaagctgccccttggcctaatattggtgtttagcttgagcctgactccttctcaacactaagagctgatgaagtcctgaagcagaaagagctctgacctgagagtcaaacatccttattctgatctcagctcagcccctgatttgttgtgtgaccctggatatgtcacttcctgtctttttgactttttaaaatgaagggtagactagaggagagcttctaaaactttaatgtggtcaacgaaatggaataggaaattccacaagtctgtccttccacaaaagcagcaaataaggtggcaaaaactcaaatttatgggaactctggaaacgaattgaaagtttacagcaatcaggtgaatacctaagaataaaagctggatttagtaaga

SEQ ID NO: 81 - RNA, 7003 nt, Homo sapiens
  source 1..7003: mol_type = mRNA
ggagttttccgcccggcgctgacggctgctgcgcccgcggctccccagtgccccgagtgccccgcgggccccgcgagcgggagtgggacccagcccctaggcagaacccaggcgccgcgcccgggacgcccgcggagagagccactcccgcccacgtcccatttcgcccctcgcgtccggagtccccgtggccaggtgtgtgtctggggaagagacttacagaagtggagttgctgagtcaaagatctaaccatgagctaccctggctatcccccgcccccaggtggctacccaccagctgcaccaggttggctggcactggcctgggttctctctctatagtagaaatcctgccatccagatcctgccactgccacctttgctagcacagctgagcagcctctgagcagcaagagaggaggaggcaggaaatttagggaaggttcttcctggagggtctggagccctggagatgaagagccgatccgaagctgccatgtagaggaaagcatctaacaggccagaggccccatgatgatgtcgaatgcccatcgggcacccagctgagccctgcaggtggtggtccctggggaggtgctgcctaccctcctccgcccagcatgccccccatcgggctggataacgtggccacctatgcggggcagttcaaccaggactatctctcgggaatggcggccaacatgtctgggacatttggaggagccaacatgcccaacctgtaccctggggcccctggggctggctacccaccagtgccccctggcggctttgggcagcccccctctgcccagcagcctgttcctccctatgggatgtatccacccccaggaggaaacccaccctccaggatgccctcatatccgccatacccaggggcccctgtgccgggccagcccatgccaccccccggacagcagcccccaggggcctaccctgggcagccaccagtgacctaccctggtcagcctccagtgccactccctgggcagcagcagccagtgccgagctacccaggatacccggggtctgggactgtcacccccgctgtgcccccaacccagtttggaagccgaggcaccatcactgatgctcccggctttgaccccctgcgagatgccgaggtcctgcggaaggccatgaaaggcttcgggacggatgagcaggccatcattgactgcctggggagtcgctccaacaagcagcggcagcagatcctactttccttcaagacggcttacggcaaggatttgatcaaagatctgaaatctgaactgtcaggaaactttgagaagacaatcttggctctgatgaagaccccagtcctctttgacatttatgagataaaggaagccatcaagggggttggcactgatgaagcctgcctgattgagatcctcgcttcccgcagcaatgagcacatccgagaattaaacagagcctacaaagcagaattcaaaaagaccctggaagaggccattcgaagcgacacatcagggcacttccagcggctcctcatctctctctctcagggaaaccgtgatgaaagcacaaacgtggacatgtcactcgcccagagagatgcccaggagctgtatgcggccggggagaaccgcctgggaacagacgagtccaagttcaatgcggttctgtgctcccggagccgggcccacctggtagcagttttcaatgagtaccagagaatgacaggccgggacattgagaagagcatctgccgggagatgtccggggacctggaggagggcatgctggccgtggtgaaatgtctcaagaataccccagccttctttgcggagaggctcaacaaggccatgaggggggcaggaacaaaggaccggaccctgattcgcatcatggtgtctcgcagcgagaccgacctcctggacatcagatcagagtataagcggatgtacggcaagtcgctgtaccacgacatctcgggagatacttcaggggattaccggaagattctgctgaagatctgtggtggcaatgactgaacagtgactggtggctcacttctgcccacctgccggcaacaccagtgccaggaaaaggccaaaagaatgtctgtttctaacaaatccacaaatagccccgagattcaccgtcctagagcttaggcctgtcttccacccctcctgacccgtatagtgtgccacaggacctgggtcggtctagaactctctcaggatgccttttctaccccatccctcacagcctcttgctgctaaaatagatgtttcatttttctgactcatgcaatcattcccctttgcctgtggctaagacttggcttcatttcgtcatgtaattgtatatttttatttggaggcatattttcttttcttacagtcattgccagacagaggcatacaagtctgtttgctgcatacacatttctggtgagggcgactgggtgggtgaagcaccgtgtcctcgctgaggagagaaagggaggcgtgcctgagaaggtagcctgtgcatctggtgagtgtgtcacgagctttgttactgccaaactcactcctttttagaaaaaacaaaaaaaaagggccagaaagtcattccttccatcttccttgcagaaaccacgagaacaaagccagttccctgtcagtgacagggcttcttgtaatttgtggtatgtgccttaaacctgaatgtctgtagccaaaacttgtttccacattaagagtcagccagctctggaatggtctggaaatgtcttcctggtaccaacttgttttcttctgcttgattctgccctgtggctcagaggtctggccttatcagccagtgaaagttcatgtaaccttacgtagagatttgtgtgcaggaaaccctgagcatacactagtttgcagggactcgtaaggacatgggaagggaggttcccgaaatccaggcaggaggcccagacacctgaaaggcaaagggatcttggttggttgcaggtgcagtgaagtccactgaaggtgtggtgcgaagaatgcagtccttcacccaggtcccaggagggaagaagggtgtgtgctaattcctggtgcccctcggcgggggccagagagaaggatggggacaacccagagagtcacaagaccagtgcctcccctcagggtgcctccaggctgaaaggggctcctggctctggtctctggggaccctgtgcccgttggttggtggtgtgagggaagagaatccataagagagtttctgagaattatggtgtcatgtccagaagctagagcttaccttgcatcaggggtctccacccactccttttccaacctcctgcgttgaggtttagaaaagagagaatcgactaggcactatggctcacgcctgtaatccaaggactttgggaagctgaggtgagaggatcacttgagctcaggagttcaagactagcctagccaacagcgagacccctgtctctactaaaaaatttggccaggcgtggtggctcacggctgtaatcccagcactttgggaggtgaggcgggcagatcacctgaggtcaggagttcgagacccagcctggccaacatggtgaaaccccatctctactaaaaatacaaaaattagccaggcatggtggcacattcctgtaatcccagctacacaggatgctgaggcaggagaatcacttgaacccaggaggcagaggttgtagtgagctgagatcacaccattgcacttcaacctgggtggacagagtgagactctgtctcaaaaaaaaaaaaaaatttacctggcattgtagtgcattccctatagtcggctactctggaggctgaggcaggaagatccttagagcccaagaaattgaggccgtagtaagctgtgattacaccactgcactccagcctggacaacagagcgagaccttgtctcaaatgagaaaaaaacaaaaagaaatgggagaatccagagagactaggctagatcaagcctgctgggtcctggcaggagccccagggagtagctcatctgcagacatttgcttgaggactaccccctaaacataaaggaagaatgacatccgaagggtgtggagcagccatgagctgagaactagcctggtctacctgagattgatggcaggtcctggtcaacacgtcagctctgcgtcagagtccatgcctcaagcccaagctgaagccccatccctgctgctctcccaagaactcctctgctagggcaggccccttgcccttgggtgccaggtgggacctgcctgatgggatggggtgcttggcatatacaacttgccatgaactcaaggtgaccctgggggcctcctgaattgtgatggggcctagaaccaatgtgctctgatgtgaccatattctgtgacattaccttgccctgtttactccaaagttcccagcctggtgcccagcaggcaatattgcacctacagacacatttactttggtttccaaagtgtttttagacatttgaatttgttgccaacatttaaacattgagagatttcatatttttaaaaatctggaattctggcttctcttgaaaactcagaaattctggcactatggggcttgcattcctgcatggctggagctgagttgcagctgcccctttaggcctgtactccttatttgctataggctccgtcttgtattacactaagcccatgtcacccatttggctcctgcaggcctttgggtttgagaccctggtctacacacttggagaccacctgttgtaaagtacatggatgtgctttggtcaaggaatagaccaaggtggatatccaggccagagtgactcagcgagtttaggtcacaggcgtatactccacttgttatataacctgcttgtgtaagttcatacttggctcaaagccactattgtttggaaaaggtataactgccctgctgacgctgtacagatgttcttgggctcggatgggcatggctccacgtggtgtgcactagcacccagagagagtgaagctattgacccctgtaagggagagtgaccatctggcagatagatagaggggagccaggacatggctcagcttgtgcccagagggagagttaagccgctgaccctgtagccagggagtgcacctgcaagcatgggggtggcaggagccacagagctggctgctgagaggagctgcagatctggagaagacagcctaggtaaaggtggacagtgtgagagctgctgatgagatagctgctgaataaaactacattttacctgcctatggcccgccaggttttctttcagctatcgcccatccacccagtcccctcgaacctcagcatgggctggaacctgaccctgggcatgacatttggcatagttgtggacctgacacctgtgtttgtcctagtcctgtttctccctgccttcctgttcctctcgctgccctcatggtcactcccaagagatccaacccatgttaagtatgggctggaggactgcatgaatgcctcatgatcttcccagaggcaaaggcacctactgccttccaaggtcagtgggaggttgggatcaacactgtttattatgcttaggacaaaaaagatagggagaaagatgtgcaaccttacaggtcatctttctgggatagaacacaatgggtcttctcctgcctcctggatatgttagtcaaggccagtccatgctacacatctagtctgacttctaaaatagaagcaccagatgaattcagccctgagagaattttcagcagctgtgggggcgctggaggaaacactattaaatagttttgcacctgagacagatagcctcactcgcctcaccctagtcctggtggcatttgtctcaggtgcaaaatttaagaaagaaaccttggagtgctcaccctgtggctgggtagatggtcctaaagtggtggttttcaagcctgagtgtgtatcaggatcatcaggggagcttgctaaagagcagttcctgcggtcagaccctcatgcattttgagcaggtgtggggactgggaaactgcatctgtaacctgctgtaatctaacgcttatctaaatactactgtgctcacacagagaacaccgcaaaagtagaggtgttcctccagagggcaggtgagcagatggcacagtctgcttggaattcagtcaggtgatgagagatgagatgaggcactcctagctttgggaagagggagctgaaagatgaacctttgcaggtgcccacggtcaaagtggtggtttaatgccatgccatgcccattttctgttggccttggcagggagttacagccctaccttaggacctggctccttatttctgctgtaggctctttcctgccctggccgagatggagtggaatgagacctagaaacatcaagctaaatacatgtcctcagaaagataaaggtttacattttcacccccatcaaatctgaaagctctctgcctgtgtttttctaagggatagggacatcattactcagtccacaacctggactcatgtagggtcccctgtcagtaaaggagtcagtcaagcccaccaggtataccaaggactcttaccctcagcccctactccttggaaagctgccccttggcctaatattggtgtttagcttgagcctgactccttctcaacactaagagctgatgaagtcctgaagcagaaagagctctgacctgagagtcaaacatccttattctgatctcagctcagcccctgatttgttgtgtgaccctggatatgtcacttcctgtctttttgactttttaaaatgaagggtagactagaggagagcttctaaaactttaatgtggtcaacgaaatggaataggaaattccacaagtctgtccttccacaaaagcagcaaataaggtggcaaaaactcaaatttatgggaactctggaaacgaattgaaagtttacagcaatcaggtgaatacctaagaataaaagctggatttagtaaga

SEQ ID NO: 82 - RNA, 1456 nt, Homo sapiens
  source 1..1456: mol_type = mRNA
gcctgtaggaggactgatctcttgatgaaatacagaaaaaccatctcagaaaaaggaaaatgggcaatcgtcatgctaaagcgagcagtcctcagggttttgatgtggatcgagatgccaaaaagctgaacaaagcctgcaaaggaatggggaccaatgaagcagccatcattgaaatcttatcgggcaggacatcagatgagaggcaacaaatcaagcaaaagtacaaggcaacgtacggcaaggagctggaggaagtactcaagagtgagctgagtggaaacttcgagaagacagcgttggcccttctggaccgtcccagcgagtacgccgcccggcagctgcagaaggctatgaagggtctgggcacagatgagtccgtcctcattgaggtcctgtgcacgaggaccaataaggaaatcatcgccattaaagaggcctaccaaaggctatttgataggagcctcgaatcagatgtcaaaggtgatacaagtggaaacctaaaaaaaatcctggtgtctctgctgcaggctaatcgcaatgaaggagatgacgtggacaaagatctagctggtcaggatgccaaagatctgtatgatgcaggggaaggccgctggggcactgatgagcttgcgttcaatgaagtcctggccaagaggagctacaagcagttacgagccacctttcaagcctatcaaattctcattggcaaagacatagaagaagccattgaagaagaaacatcaggcgacttgcagaaggcctatttaactctcgtgagatgtgcccaggattgtgaggactattttgctgaacgtctgtacaagtcgatgaagggtgcggggaccgatgaggagacgttgattcgcatagtcgtgaccagggccgaggtggaccttcaggggatcaaagcaaagttccaagagaagtatcagaagtctctctctgacatggttcgctcagatacctccggggacttccggaaactgctagtagccctcttgcactgagccaagccagggcaataggaacacagggtggaaccgcctttgtcaagagcacattccaaatcaaacttgcaaatgagactcccgcacgaaaacccttaagagtcccggattactttcttggcagcttaagtggcgcagccaggccaagctgtgtaagttaagggcagtaacgttaagatgcgtgggcagggcaccttgaactctggcttagcaagcatctaggctgcctcttcactttcttttagcatggtaactggatgttttctaaacactaatgaaatcagcagttgatgaaaaaactatgcatttgtaatggcacatttagaaggatatgcatcacacaagtaaggtacaggaaagacaaaattaaacaatttattaattttccttctgtgtgttcaatttgaaagcctcattgttaattaaagttgtggattatgcctcta

SEQ ID NO: 83 - RNA, 1579 nt, Homo sapiens
  source 1..1579: mol_type = mRNA
gcctgtaggaggactgatctcttgatgaaatacagaaaaaccatctcagaaaaaggaaaatgggcaatcgtcatagccagtcgtacaccctctcagaaggcagtcaacagttgcctaaaggggactcccaaccctcgacagtcgtgcagcctctcagccacccatcacggaatggagagccagaggccccacagcctgctaaagcgagcagtcctcagggttttgatgtggatcgagatgccaaaaagctgaacaaagcctgcaaaggaatggggaccaatgaagcagccatcattgaaatcttatcgggcaggacatcagatgagaggcaacaaatcaagcaaaagtacaaggcaacgtacggcaaggagctggaggaagtactcaagagtgagctgagtggaaacttcgagaagacagcgttggcccttctggaccgtcccagcgagtacgccgcccggcagctgcagaaggctatgaagggtctgggcacagatgagtccgtcctcattgaggtcctgtgcacgaggaccaataaggaaatcatcgccattaaagaggcctaccaaaggctatttgataggagcctcgaatcagatgtcaaaggtgatacaagtggaaacctaaaaaaaatcctggtgtctctgctgcaggctaatcgcaatgaaggagatgacgtggacaaagatctagctggtcaggatgccaaagatctgtatgatgcaggggaaggccgctggggcactgatgagcttgcgttcaatgaagtcctggccaagaggagctacaagcagttacgagccacctttcaagcctatcaaattctcattggcaaagacatagaagaagccattgaagaagaaacatcaggcgacttgcagaaggcctatttaactctcgtgagatgtgcccaggattgtgaggactattttgctgaacgtctgtacaagtcgatgaagggtgcggggaccgatgaggagacgttgattcgcatagtcgtgaccagggccgaggtggaccttcaggggatcaaagcaaagttccaagagaagtatcagaagtctctctctgacatggttcgctcagatacctccggggacttccggaaactgctagtagccctcttgcactgagccaagccagggcaataggaacacagggtggaaccgcctttgtcaagagcacattccaaatcaaacttgcaaatgagactcccgcacgaaaacccttaagagtcccggattactttcttggcagcttaagtggcgcagccaggccaagctgtgtaagttaagggcagtaacgttaagatgcgtgggcagggcaccttgaactctggcttagcaagcatctaggctgcctcttcactttcttttagcatggtaactggatgttttctaaacactaatgaaatcagcagttgatgaaaaaactatgcatttgtaatggcacatttagaaggatatgcatcacacaagtaaggtacaggaaagacaaaattaaacaatttattaattttccttctgtgtgttcaatttgaaagcctcattgttaattaaagttgtggattatgcctcta

SEQ ID NO: 84 - protein, 227 aa, synthetic construct
DKTHTCPPCPAPELLGGPSVFLFPPKPKDTLMISRTPEVTCVVVDVSHEDPEVKFNWYVDGVEVHNAKTKPREEQYNSTYRVVSVLTVLHQDWLNGKEYKCKVSNKALPAPIEKTISKAKGQPREPQVYTLPPSRDELTKNQVSLTCLVKGFYPSDIAVEWESNGQPENNYKTTPPVLDSDGSFFLYSKLTVDKSRWQQGNVFSCSVMHEALHNHYTQKSLSLSPGK

SEQ ID NO: 85 - protein, 569 aa, synthetic construct
MEFGLSWVFLVALFRGVQCAQVLRGTVTDFPGFDERADAETLRKAMKGLGTDEESILTLLTSRSNAQRQEISAAFKTLFGRDLLDDLKSELTGKFEKLIVALMKPSRLYDAYELKHALKGAGTNEKVLTEIIASRTPEELRAIKQVYEEEYGSSLEDDVVGDTSGYYQRMLVVLLQANRDPDAGIDEAQVEQDAQALFQAGELKWGTDEEKFITIFGTRSVSHLRKVFDKYMTISGFQIEETIDRETSGNLEQLLLAVVKSIRSIPAYLAETLYYAMKGAGTDDHTLIRVMVSRSEIDLFNIRKEFRKNFATSLYSMIKGDTSGDYKKALLLLCGEDDGGGGDKTHTCPPCPAPELLGGPSVFLFPPKPKDTLMISRTPEVTCVVVDVSHEDPEVKFNWYVDGVEVHNAKTKPREEQYNSTYRVVSVLTVLHQDWLNGKEYKCKVSNKALPAPIEKTISKAKGQPREPQVYTLPPSRDELTKNQVSLTCLVKGFYPSDIAVEWESNGQPENNYKTTPPVLDSDGSFFLYSKLTVDKSRWQQGNVFSCSVMHEALHNHYTQKSLSLSPGK

SEQ ID NO: 86 - protein, 550 aa, synthetic construct
AQVLRGTVTDFPGFDERADAETLRKAMKGLGTDEESILTLLTSRSNAQRQEISAAFKTLFGRDLLDDLKSELTGKFEKLIVALMKPSRLYDAYELKHALKGAGTNEKVLTEIIASRTPEELRAIKQVYEEEYGSSLEDDVVGDTSGYYQRMLVVLLQANRDPDAGIDEAQVEQDAQALFQAGELKWGTDEEKFITIFGTRSVSHLRKVFDKYMTISGFQIEETIDRETSGNLEQLLLAVVKSIRSIPAYLAETLYYAMKGAGTDDHTLIRVMVSRSEIDLFNIRKEFRKNFATSLYSMIKGDTSGDYKKALLLLCGEDDGGGGDKTHTCPPCPAPELLGGPSVFLFPPKPKDTLMISRTPEVTCVVVDVSHEDPEVKFNWYVDGVEVHNAKTKPREEQYNSTYRVVSVLTVLHQDWLNGKEYKCKVSNKALPAPIEKTISKAKGQPREPQVYTLPPSRDELTKNQVSLTCLVKGFYPSDIAVEWESNGQPENNYKTTPPVLDSDGSFFLYSKLTVDKSRWQQGNVFSCSVMHEALHNHYTQKSLSLSPGK

SEQ ID NO: 87 - protein, 718 aa, synthetic construct
MEFGLSWVFLVALFRGVQCAQVLRGTVTDFPGFDERADAETLRKAMKGLGTDEESILTLLTSRSNAQRQEISAAFKTLFGRDLLDDLKSELTGKFEKLIVALMKPSRLYDAYELKHALKGAGTNEKVLTEIIASRTPEELRAIKQVYEEEYGSSLEDDVVGDTSGYYQRMLVVLLQANRDPDAGIDEAQVEQDAQALFQAGELKWGTDEEKFITIFGTRSVSHLRKVFDKYMTISGFQIEETIDRETSGNLEQLLLAVVKSIRSIPAYLAETLYYAMKGAGTDDHTLIRVMVSRSEIDLFNIRKEFRKNFATSLYSMIKGDTSGDYKKALLLLCGEDDGGGGDKTHTCPPCPAPELLGGPSVFLFPPKPKDTLMISRTPEVTCVVVDVSHEDPEVKFNWYVDGVEVHNAKTKPREEQYNSTYRVVSVLTVLHQDWLNGKEYKCKVSNKALPAPIEKTISKAKGQPREPQVYTLPPSRDELTKNQVSLTCLVKGFYPSDIAVEWESNGQPENNYKTTPPVLDSDGSFFLYSKLTVDKSRWQQGNVFSCSVMHEALHNHYTQKSLSLSPGKGGGGSGGGGSFLNSLFNQEVQIPLTESYCGPCPKNWICYKNNCYQFFDESKNWYESQASCMSQNASLLKVYSKEDQDLLKLVKSYHWMGLVHIPTNGSWQWEDGSILSPNLLTIIEMQKGDCALYASSFKGYIENCSTPNTYICMQRTV

SEQ ID NO: 88 - protein, 599 aa, synthetic construct
MALPVTALLLPLALLLHAARPAQVLRGTVTDFPGFDERADAETLRKAMKGLGTDEESILTLLTSRSNAQRQEISAAFKTLFGRDLLDDLKSELTGKFEKLIVALMKPSRLYDAYELKHALKGAGTNEKVLTEIIASRTPEELRAIKQVYEEEYGSSLEDDVVGDTSGYYQRMLVVLLQANRDPDAGIDEAQVEQDAQALFQAGELKWGTDEEKFITIFGTRSVSHLRKVFDKYMTISGFQIEETIDRETSGNLEQLLLAVVKSIRSIPAYLAETLYYAMKGAGTDDHTLIRVMVSRSEIDLFNIRKEFRKNFATSLYSMIKGDTSGDYKKALLLLCGEDDGGGGSGGGGSGGGGSQVQLVQSGGGVVQPGRSLRLSCKASGYTFTRYTMHWVRQAPGKGLEWIGYINPSRGYTNYNQKVKDRFTISTDKSKSTAFLQMDSLRPEDTGVYFCARYYDDHYCLDYWGQGTTLTVSSGGGGSGGGGSGGGGSQIVMTQSPSSLSASVGDRVTITCSASSSVSYMNWYQQTPGKAPKRWIYDTSKLASGVPSRFSGSGSGTDYTFTISSLQPEDIATYYCQQWSSNPFTFGQGTKLQITRAAA

SEQ ID NO: 89 - protein, 578 aa, synthetic construct
AQVLRGTVTDFPGFDERADAETLRKAMKGLGTDEESILTLLTSRSNAQRQEISAAFKTLFGRDLLDDLKSELTGKFEKLIVALMKPSRLYDAYELKHALKGAGTNEKVLTEIIASRTPEELRAIKQVYEEEYGSSLEDDVVGDTSGYYQRMLVVLLQANRDPDAGIDEAQVEQDAQALFQAGELKWGTDEEKFITIFGTRSVSHLRKVFDKYMTISGFQIEETIDRETSGNLEQLLLAVVKSIRSIPAYLAETLYYAMKGAGTDDHTLIRVMVSRSEIDLFNIRKEFRKNFATSLYSMIKGDTSGDYKKALLLLCGEDDGGGGSGGGGSGGGGSQVQLQQSGAELARPGASVKMSCKASGYTFTRYTMHWVKQRPGQGLEWIGYINPSRGYTNYNQKFKDKATLTTDKSSSTAYMQLSSLTSEDSAVYYCARYYDDHYCLDYWGQGTTLTVSSGGGGSGGGGSGGGGSQIVLTQSPAIMSASPGEKVTMTCSASSSVSYMNWYQQKSGTSPKRWIYDTSKLASGVPAHFRGSGSGTSYSLTISGMEAEDAATYYCQQWSSNPFTFGSGTKLEINRAAA

SEQ ID NO: 90 - protein, 599 aa, synthetic construct; identical to SEQ ID NO: 88

SEQ ID NO: 91 - protein, 578 aa, synthetic construct
AQVLRGTVTDFPGFDERADAETLRKAMKGLGTDEESILTLLTSRSNAQRQEISAAFKTLFGRDLLDDLKSELTGKFEKLIVALMKPSRLYDAYELKHALKGAGTNEKVLTEIIASRTPEELRAIKQVYEEEYGSSLEDDVVGDTSGYYQRMLVVLLQANRDPDAGIDEAQVEQDAQALFQAGELKWGTDEEKFITIFGTRSVSHLRKVFDKYMTISGFQIEETIDRETSGNLEQLLLAVVKSIRSIPAYLAETLYYAMKGAGTDDHTLIRVMVSRSEIDLFNIRKEFRKNFATSLYSMIKGDTSGDYKKALLLLCGEDDGGGGSGGGGSGGGGSQVQLVQSGGGVVQPGRSLRLSCKASGYTFTRYTMHWVRQAPGKGLEWIGYINPSRGYTNYNQKVKDRFTISTDKSKSTAFLQMDSLRPEDTGVYFCARYYDDHYCLDYWGQGTTLTVSSGGGGSGGGGSGGGGSQIVMTQSPSSLSASVGDRVTITCSASSSVSYMNWYQQTPGKAPKRWIYDTSKLASGVPSRFSGSGSGTDYTFTISSLQPEDIATYYCQQWSSNPFTFGQGTKLQITRAAA

SEQ ID NO: 92 - protein, 598 aa, synthetic construct
MALPVTALLLPLALLLHAARPAQVLRGTVTDFPGFDERADAETLRKAMKGLGTDEESILTLLTSRSNAQRQEISAAFKTLFGRDLLDDLKSELTGKFEKLIVALMKPSRLYDAYELKHALKGAGTNEKVLTEIIASRTPEELRAIKQVYEEEYGSSLEDDVVGDTSGYYQRMLVVLLQANRDPDAGIDEAQVEQDAQALFQAGELKWGTDEEKFITIFGTRSVSHLRKVFDKYMTISGFQIEETIDRETSGNLEQLLLAVVKSIRSIPAYLAETLYYAMKGAGTDDHTLIRVMVSRSEIDLFNIRKEFRKNFATSLYSMIKGDTSGDYKKALLLLCGEDDGGGGSGGGGSGGGGSQVQLVQSGGGVVQPGRSLRLSCKASGYTFTRYTMHWVRQAPGKGLEWIGYINPSRGYTNYNQKVKDRFTISTDKSKSTAFLQMDSLRPEDTGVYFCARYYDDHYCLDYWGQGTTLTVSSGGGGSGGGGSGGGGSDIQMTQSPSSLSASVGDRVTITCSASSSVSYMNWYQQTPGKAPKRWIYDTSKLASGVPSRFSGSGSGTDYTFTISSLQPEDIATYYCQQWSSNPFTFGQGTKLQITRAA

SEQ ID NO: 93 - protein, 577 aa, synthetic construct
AQVLRGTVTDFPGFDERADAETLRKAMKGLGTDEESILTLLTSRSNAQRQEISAAFKTLFGRDLLDDLKSELTGKFEKLIVALMKPSRLYDAYELKHALKGAGTNEKVLTEIIASRTPEELRAIKQVYEEEYGSSLEDDVVGDTSGYYQRMLVVLLQANRDPDAGIDEAQVEQDAQALFQAGELKWGTDEEKFITIFGTRSVSHLRKVFDKYMTISGFQIEETIDRETSGNLEQLLLAVVKSIRSIPAYLAETLYYAMKGAGTDDHTLIRVMVSRSEIDLFNIRKEFRKNFATSLYSMIKGDTSGDYKKALLLLCGEDDGGGGSGGGGSGGGGSQVQLVQSGGGVVQPGRSLRLSCKASGYTFTRYTMHWVRQAPGKGLEWIGYINPSRGYTNYNQKVKDRFTISTDKSKSTAFLQMDSLRPEDTGVYFCARYYDDHYCLDYWGQGTTLTVSSGGGGSGGGGSGGGGSDIQMTQSPSSLSASVGDRVTITCSASSSVSYMNWYQQTPGKAPKRWIYDTSKLASGVPSRFSGSGSGTDYTFTISSLQPEDIATYYCQQWSSNPFTFGQGTKLQITRAA

SEQ ID NO: 94 - protein, 605 aa, synthetic construct
MASPLTRFLSLNLLLLGESIILGSGEAAQVLRGTVTDFPGFDERADAETLRKAMKGLGTDEESILTLLTSRSNAQRQEISAAFKTLFGRDLLDDLKSELTGKFEKLIVALMKPSRLYDAYELKHALKGAGTNEKVLTEIIASRTPEELRAIKQVYEEEYGSSLEDDVVGDTSGYYQRMLVVLLQANRDPDAGIDEAQVEQDAQALFQAGELKWGTDEEKFITIFGTRSVSHLRKVFDKYMTISGFQIEETIDRETSGNLEQLLLAVVKSIRSIPAYLAETLYYAMKGAGTDDHTLIRVMVSRSEIDLFNIRKEFRKNFATSLYSMIKGDTSGDYKKALLLLCGEDDGGGGSGGGGSGGGGSQVQLVQSGGGVVQPGRSLRLSCKASGYTFTRYTMHWVRQAPGKGLEWIGYINPSRGYTNYNQKVKDRFTISTDKSKNTAFLQMDSLRPEDTGVYFCARYYDDHYCLDYWGQGTTLTVSSGGGGSGGGGSGGGGSQIVMTQSPSSLSASVGDRVTITCSASSSVSYMNWYQQTPGKAPKRWIYDTSKLASGVPSRFSGSGSGTDYTFTISSLQPEDIATYYCQQWSSNPFTFGQGTKLQITRAAA

SEQ ID NO: 95 - protein, 578 aa, synthetic construct
AQVLRGTVTDFPGFDERADAETLRKAMKGLGTDEESILTLLTSRSNAQRQEISAAFKTLFGRDLLDDLKSELTGKFEKLIVALMKPSRLYDAYELKHALKGAGTNEKVLTEIIASRTPEELRAIKQVYEEEYGSSLEDDVVGDTSGYYQRMLVVLLQANRDPDAGIDEAQVEQDAQALFQAGELKWGTDEEKFITIFGTRSVSHLRKVFDKYMTISGFQIEETIDRETSGNLEQLLLAVVKSIRSIPAYLAETLYYAMKGAGTDDHTLIRVMVSRSEIDLFNIRKEFRKNFATSLYSMIKGDTSGDYKKALLLLCGEDDGGGGSGGGGSGGGGSQVQLVQSGGGVVQPGRSLRLSCKASGYTFTRYTMHWVRQAPGKGLEWIGYINPSRGYTNYNQKVKDRFTISTDKSKNTAFLQMDSLRPEDTGVYFCARYYDDHYCLDYWGQGTTLTVSSGGGGSGGGGSGGGGSQIVMTQSPSSLSASVGDRVTITCSASSSVSYMNWYQQTPGKAPKRWIYDTSKLASGVPSRFSGSGSGTDYTFTISSLQPEDIATYYCQQWSSNPFTFGQGTKLQITRAAA

SEQ ID NO: 96 - protein, 615 aa, synthetic construct
MALPVTALLLPLALLLHAARPAQVLRGTVTDFPGFDERADAETLRKAMKGLGTDEESILTLLTSRSNAQRQEISAAFKTLFGRDLLDDLKSELTGKFEKLIVALMKPSRLYDAYELKHALKGAGTNEKVLTEIIASRTPEELRAIKQVYEEEYGSSLEDDVVGDTSGYYQRMLVVLLQANRDPDAGIDEAQVEQDAQALFQAGELKWGTDEEKFITIFGTRSVSHLRKVFDKYMTISGFQIEETIDRETSGNLEQLLLAVVKSIRSIPAYLAETLYYAMKGAGTDDHTLIRVMVSRSEIDLFNIRKEFRKNFATSLYSMIKGDTSGDYKKALLLLCGEDDGGGGSGGGGSGGGGSQVQLQQSGAELARPGASVKMSCKASGYTFTRYTMHWVKQRPGQGLEWIGYINPSRGYTNYNQKFKDKATLTTDKSSSTAYMQLSSLTSEDSAVYYCARYYDDHYCLDYWGQGTTLTVSSGGGGSGGGGSGGGGSQIVLTQSPAIMSASPGEKVTMTCSASSSVSYMNWYQQKSGTSPKRWIYDTSKLASGVPAHFRGSGSGTSYSLTISGMEAEDAATYYCQQWSSNPFTFGSGTKLEINRAAAEPKSCDKTHTCPPCPA

SEQ ID NO: 97 - protein, 594 aa, synthetic construct
AQVLRGTVTDFPGFDERADAETLRKAMKGLGTDEESILTLLTSRSNAQRQEISAAFKTLFGRDLLDDLKSELTGKFEKLIVALMKPSRLYDAYELKHALKGAGTNEKVLTEIIASRTPEELRAIKQVYEEEYGSSLEDDVVGDTSGYYQRMLVVLLQANRDPDAGIDEAQVEQDAQALFQAGELKWGTDEEKFITIFGTRSVSHLRKVFDKYMTISGFQIEETIDRETSGNLEQLLLAVVKSIRSIPAYLAETLYYAMKGAGTDDHTLIRVMVSRSEIDLFNIRKEFRKNFATSLYSMIKGDTSGDYKKALLLLCGEDDGGGGSGGGGSGGGGSQVQLQQSGAELARPGASVKMSCKASGYTFTRYTMHWVKQRPGQGLEWIGYINPSRGYTNYNQKFKDKATLTTDKSSSTAYMQLSSLTSEDSAVYYCARYYDDHYCLDYWGQGTTLTVSSGGGGSGGGGSGGGGSQIVLTQSPAIMSASPGEKVTMTCSASSSVSYMNWYQQKSGTSPKRWIYDTSKLASGVPAHFRGSGSGTSYSLTISGMEAEDAATYYCQQWSSNPFTFGSGTKLEINRAAAEPKSCDKTHTCPPCPA

SEQ ID NO: 98 - protein, 19 aa, synthetic construct
MEFGLSWVFLVALFRGVQC

SEQ ID NO: 99 - protein, 697 aa, synthetic construct
MEFGLSWVFLVALFRGVQCEEELQVIQPDKSVLVAAGETATLRCTATSLIPVGPIQWFRGAGPGRELIYNQKEGHFPRVTTVSDLTKRNNMDFSIRIGNITPADAGTYYCVKFRKGSPDDVEFKSGAGTELSVRAKPGGGGSGGGGSAQVLRGTVTDFPGFDERADAETLRKAMKGLGTDEESILTLLTSRSNAQRQEISAAFKTLFGRDLLDDLKSELTGKFEKLIVALMKPSRLYDAYELKHALKGAGTNEKVLTEIIASRTPEELRAIKQVYEEEYGSSLEDDVVGDTSGYYQRMLVVLLQANRDPDAGIDEAQVEQDAQALFQAGELKWGTDEEKFITIFGTRSVSHLRKVFDKYMTISGFQIEETIDRETSGNLEQLLLAVVKSIRSIPAYLAETLYYAMKGAGTDDHTLIRVMVSRSEIDLFNIRKEFRKNFATSLYSMIKGDTSGDYKKALLLLCGEDDGGGGDKTHTCPPCPAPELLGGPSVFLFPPKPKDTLMISRTPEVTCVVVDVSHEDPEVKFNWYVDGVEVHNAKTKPREEQYNSTYRVVSVLTVLHQDWLNGKEYKCKVSNKALPAPIEKTISKAKGQPREPQVYTLPPSRDELTKNQVSLTCLVKGFYPSDIAVEWESNGQPENNYKTTPPVLDSDGSFFLYSKLTVDKSRWQQGNVFSCSVMHEALHNHYTQKSLSLSPGK

SEQ ID NO: 100 - protein, 678 aa, synthetic construct
EEELQVIQPDKSVLVAAGETATLRCTATSLIPVGPIQWFRGAGPGRELIYNQKEGHFPRVTTVSDLTKRNNMDFSIRIGNITPADAGTYYCVKFRKGSPDDVEFKSGAGTELSVRAKPGGGGSGGGGSAQVLRGTVTDFPGFDERADAETLRKAMKGLGTDEESILTLLTSRSNAQRQEISAAFKTLFGRDLLDDLKSELTGKFEKLIVALMKPSRLYDAYELKHALKGAGTNEKVLTEIIASRTPEELRAIKQVYEEEYGSSLEDDVVGDTSGYYQRMLVVLLQANRDPDAGIDEAQVEQDAQALFQAGELKWGTDEEKFITIFGTRSVSHLRKVFDKYMTISGFQIEETIDRETSGNLEQLLLAVVKSIRSIPAYLAETLYYAMKGAGTDDHTLIRVMVSRSEIDLFNIRKEFRKNFATSLYSMIKGDTSGDYKKALLLLCGEDDGGGGDKTHTCPPCPAPELLGGPSVFLFPPKPKDTLMISRTPEVTCVVVDVSHEDPEVKFNWYVDGVEVHNAKTKPREEQYNSTYRVVSVLTVLHQDWLNGKEYKCKVSNKALPAPIEKTISKAKGQPREPQVYTLPPSRDELTKNQVSLTCLVKGFYPSDIAVEWESNGQPENNYKTTPPVLDSDGSFFLYSKLTVDKSRWQQGNVFSCSVMHEALHNHYTQKSLSLSPGK

SEQ ID NO: 101 - protein, 678 aa, synthetic construct
AQVLRGTVTDFPGFDERADAETLRKAMKGLGTDEESILTLLTSRSNAQRQEISAAFKTLFGRDLLDDLKSELTGKFEKLIVALMKPSRLYDAYELKHALKGAGTNEKVLTEIIASRTPEELRAIKQVYEEEYGSSLEDDVVGDTSGYYQRMLVVLLQANRDPDAGIDEAQVEQDAQALFQAGELKWGTDEEKFITIFGTRSVSHLRKVFDKYMTISGFQIEETIDRETSGNLEQLLLAVVKSIRSIPAYLAETLYYAMKGAGTDDHTLIRVMVSRSEIDLFNIRKEFRKNFATSLYSMIKGDTSGDYKKALLLLCGEDDGGGGDKTHTCPPCPAPELLGGPSVFLFPPKPKDTLMISRTPEVTCVVVDVSHEDPEVKFNWYVDGVEVHNAKTKPREEQYNSTYRVVSVLTVLHQDWLNGKEYKCKVSNKALPAPIEKTISKAKGQPREPQVYTLPPSRDELTKNQVSLTCLVKGFYPSDIAVEWESNGQPENNYKTTPPVLDSDGSFFLYSKLTVDKSRWQQGNVFSCSVMHEALHNHYTQKSLSLSPGKGGGGSGGGGSEEELQVIQPDKSVLVAAGETATLRCTATSLIPVGPIQWFRGAGPGRELIYNQKEGHFPRVTTVSDLTKRNNMDFSIRIGNITPADAGTYYCVKFRKGSPDDVEFKSGAGTELSVRAKP

SEQ ID NO: 102 - protein, 216 aa, Homo sapiens
MGWIRGRRSRHSWEMSEFHNYNLDLKKSDFSTRWQKQRCPVVKSKCRENASPFFFCCFIAVAMGIRFIIMVTIWSAVFLNSLFNQEVQIPLTESYCGPCPKNWICYKNNCYQFFDESKNWYESQASCMSQNASLLKVYSKEDQDLLKLVKSYHWMGLVHIPTNGSWQWEDGSILSPNLLTIIEMQKGDCALYASSFKGYIENCSTPNTYICMQRTV

SEQ ID NO: 103 - protein, 144 aa, Homo sapiens
IWSAVFLNSLFNQEVQIPLTESYCGPCPKNWICYKNNCYQFFDESKNWYESQASCMSQNASLLKVYSKEDQDLLKLVKSYHWMGLVHIPTNGSWQWEDGSILSPNLLTIIEMQKGDCALYASSFKGYIENCSTPNTYICMQRTV

SEQ ID NO: 104 - DNA, 17689 bp, Homo sapiens
  source 1..17689: mol_type = genomic DNA
actttcaattctagatcaggaactgaggacatatctaaattttctagttttatagaaggcttttatccacaagaatcaagatcttccctctctgagcaggtgtgtgtatgtgtgtatgtgtgtgtgtttattattcaagatatgagaaattatatttcaacctcaaaaaaataaaaatatttacactataaggtaattctaattgtttcttagatgcttgaatagaactcctgaggatacggaatgcttatcatttctgatgtatattctatcactgtatctgatgataggtaattaggatatacttattgaagaatcagaagttgtaatattactataagaagaagccttgtctctaagcaaaactagaaaaatgaatctttacatttaggatgagaagaattgagattcaatttaaattgtcaaatttttgagttttctgatgctgtagggggcacttacctttgatacacatctttacatgcaaggtgaaacaagttatatctgtgctttccaactatcataatcaaatatgaaatagcttttatttttgaaatctaagcactatgcttatttattaaatggttttttctggaagctctgctgtgcattgctaagatgttactatataaacatgtgagattagttttgttaatgatgatggtgatgataatttgttgatgatgatgatatgggcacgttggattaaaatgcactagaaaaggacattcaacaaaagtgcatataacttacctgagtttagcttgcagaaagaaaactaaattattgccagataaaataaacaactggaaacacttgatcttagctaaaaggccaagaagcaataaacgactataaacagaaaactgggtgtgttgttatctaatatcagtaaagtaaaatattggtattaaatatctcaatgtaggtgaattaataggttcattatattgttatgacattttgaagtaattggcgattattttacaaccaagagaaatgtataaaattaattttgcctggctttatgtgaattgtcatttctattcttttcttaaaggcatgcacaggggaaaagtttctgcattttacttttctattcaaaatattttatctcaccacgggaaagagaacaaaaaacaaatgcccagttttattttattcaggaatcctttgtgcattgaagactttagattcctctctgcggtagacgtgcacttataagtatttgatggggtggattcgtggtcggaggtctcgacacagctggggtatgtttttaccacataagtgtgtagttttgtttttatacaattttaagataccaagaatttcatacaagcatataaggcataggcaagcaatttactctgattcttttcatgttctatttatgttgatttcatgttatgttcatattgtattttaaatcaagtcttccaaaacttaaaaacttttttccctttattttattaactatattatggtaaagtcgctcacaacttgggacagcttgaaatagtgaaatagatgtggagtcagacttgaattttactcaaacttttaccgctctctagatttgaagggtcaatttgcaacctctgtgtagtttagtttagtttctttttctatcaaatacaggcatgaaacattccatatttatcttagatttgtgtaatattcaaatcaactgacatgtatgttaaagcactttttatcctaaaggtgtttataaatttataacttattcacagttggtaacattatattaaataagctttatgattttggccatctctagcattcaatttcttcatccataaagtgatacctactctctttactccatatgtaaaataactgagttaggtattacatgcgcaatcaatgtctaattttacctataaaatataattcatattatcatttaatttataaaaggcttttgtacaacaaacccccgtgacatgaatttacatatgtaacaaaccttcgcatgcacccctgaaccaaaaataaaagtttaaaaaaggcttttaagtaaatattaatcatcagtaaataattaatatttcaagagagcaaaatgattctttaggtattttgttcagaggcaagattatctgtctttgttctaaatcattagaccccactattttagcctatgtatgtccttcattataaagaaaattagatggctgggcacagtggctcatgcctataatcccagaaatttgggaggctgaggtgggtagatcacctgtggtcaggagttcgagaccagcctggccaatatggtgaaaccccgtctgtactaaaaatacaaaaattagccaggtatggtggcacaagcctgtaatcccagctactcaagaggctgaggcaggagaaccgcttgaacccaggaggcggcggttgcagtgagccaatatcacgccattgcactccatctcaaaaaaaaaaaaagaaaagaagaaaattagacacactgctatttactaaaagcttactaaatgattgatgttattgatgctaagttcattatatttttattttatttttaaaatacccatactggattgtgacagtatccttttcttttttatttctttcgtcttttgcaaattaggaaaactgggatgcaaaagctaggttatttgtgaagttatcaagtttgtatatgtggatctgtgatttaaatacatgtctttctccctacatctgccttttcactaaccaagtccctttctggtaatgttaggtttcattatacattacgaattaactaattttaatagtatataggattttgctaagggtactttccatggcataaatatagttttatttatatagtaaagtgtaaacataataatgtagtactataaaacaaaagtaagttcatgttgtactttaaaaaggatagtcaggggaagtacatagatggaaatggcaagctgaatttttaaaatttatgccccaaatggcagaaaggccatgactcatataagcctgaattctttttctctagagatgagtgaatttcataattataacttggatctgaagaagagtgatttttcaacacgatggcaaaagcaaagatgtccagtagtcaaaagcaaatgtagagaaaatggtaagtcctatgttccatttgtctactctcagtatattgaaatgaatcttggaaactatgtgattaaatgaatggcaatcattcagttgactttatcttcatgaggaaagcaggaataacatgaactctcatataatattaaaatatataataaaattatggtattaaaagctattgagtttagaatattgtcacgccctaaaaaatgatgagtttattatcatgataatataatcgaggcaggagtttctaagagatcactgaaaagaaaactaaatagaaatgaaaaagagaagagaaaagatattttaaaaaccctccagagatatgttcctaaacattatagaagtggtagcttgattattatttatagaattgtttctgagttcagtgaagaagatatattctccaatgacttttttcaaagcagaatattattggtaatagacctttatatagtttgtatgaaaaggaaaacaacagatgaccctcacttatcaatttttattaaaaactaagaaacaaattattaacaaatagcatctctttacaagaattaatttaaggaatgcaaagtgctatatgtaaaaatccctttttggactaaaatattcaattgttaccaaaatttaaaacacacatgccctttccctcaacaattatcattgtgggaatttatcccagagagagactcaaaaatatgcacagatgggtatgaaatgtatcattatttctcatagcaagacctaagaaacaatttaaatatccactggaaaaaaaaattgacagtccgtcaaaaattagatctgtccagagttgtcagtgaaatacaatgcagctatttataaatttggtatccttatacgccatgaggactaatcaccaggatattgtcttaggtaaaaaaaaaaaaaaaattcataggatattttgtgtattatagtttctttaaaatgtatttttaatatgtagttaaggggaacggtaatttttgtttatttttagttggcatgtaataattatacatatttatgggatacagtgatatttccattcaactatacaatgtctaatgaccaaatcaaggtaattagcacacccatcacctcaacatttatcacttctttgtgttgggaacattcaaaaccttctcttctagctatctgaaaatatacaataaattactcttaacagtactctccctacagtgctatagaacactagaaaaatcccgcatgtagctgtaattttgtattcattaaccaacctctcccaatcttctcctcccccctattctttctagccttaaataaccacaattctactctctacttctgtgagctaaaagtttgtatctcctacatatgagtgagaacatgtggtatttatctttccatgcctgatttactctacgtaacattatgtacttctgactcatccatgttggtgcaaataataggatttcattcttttcattcttttttttatgactgaatggtattcctctgtgtgtgtgtgtgtgtgtgtgtgtgtgtctgtgtgtgcttagctatttatctgttaatggacacaggttaattccatatcttggctattgtgaataatgctgcaataaacatgggggtgcagacgttacttcaatatactgatttcctttccattggagaaagacccagattgctgagtcatatggtagttatatttttagttttttaagggacctccatactgtttccataatggctatactaatttacattcccaccaaaattgtataaacattagcctttccctgcatcctcactgtcatttgttattttttgtctttttaaataatagctattctaactagggtgagatgatattcattgtggttttgattttcatcttcttgatgatgaatgatgttgaatttcaaaaaatatatctgtggctatttgtatatcttctcagaaatatctattcagatcctttgctcattttcaaatcagtttttgttgttgctgttgagttgtttgaattccttgtatattctggatattggtctcttgttagaggaatagtttgcgagtattttctcttattctacaagttgtctcttcactctgtcaattgtttcctatgcagtagagaagtgtgttagtttgatacaatctcatttgtttctttttgcttttgttgcctgtacttttgaattcttacccataaaatctttgcctagactaatgtcctgtggtgtttctcttatctcttctagtagtgttatagattcagttcttatatttaagtcattaatccattttgagttgatttttgtatatggtgtgagatgagggtctaatttcattcctctatgtggatatccagttttttcagcttcatttattgaagaggctctcctttcccagtgtatgttattggtgactttctggaaaaatcagttggctataatacatggatttattcctgggttgtctattctgttttattggtctaggtgtctatttttatatcaatgccatactgttttggttgttgtagttttgtcgtatatattgaagtcaggtaacgtgatgccaccagttttcttcatttttgttcaagattgctttggctattcagtcttttgtggtaccatataaattttaagatatttttctatttctgtagagaatgttactggtatcgtgttaggaattgcactgaatctgtagattgctttgagtcatatgattactttaacaatattctttctgtctatgaacatgagatgtctttccatttttttgcatcctctttggtttcattcatcagtattttacagttttcattgtagaggtctttcacttgtgtgattaaatttattccagggtattttattatttgtaggtattacaaatggaattgacttcttgatttctttttcatccagtttgttattggtgtatagaaacactactgatttttgtatgcagatttttgatcctgaaactttactgaatttgtttatttgttcaaaggcatgttgtttaattttcatgtatctgtgcagtttccaaagttcctcgttatcaatttctagttttattccattgttgtcagaaaatttacttgatataatattgacttttggaaatgttttgagacttatcacctagcatatggtctgtcctgatgaatgttccatgtgctgataagaagaatgtgtattttgcagcagttggatgaaatgttctgtacatttagttaggttcattaggtctatattatagttttactctgatgtttcttttatgattttctgcctgaatgatctgtccattgcttaaaatgtgttgttgaactcccctgcccttattgtattcatctatttctcccttcagatctattaatatttacttaatatatctgagtgctgtaatattgggtgcatatgtatacttataaatactatattatattgctgaagtgacccatttgtcattatataatggtcttctttgactcttttttactctttttgacttaaagtctattttatctaagtatagctgtgcctgctctttactggttttcattttcatggaatatctgttttcatccctatacagtcagtctatgtgtgtttttatgagcaaagtgggtttcttgtaggcaatatattgtttggttttttttgtttttaatccattcagtcactctatgtcttttacttggagaatttagcccccttgcatttaatattattattggtatgtaagaacttactattgccattttgttccttgttttctagtggttttgtaagtcttcctttcttcctgtcttcctttgtgattaagttgctttctctggcagtgtattttaattccttgattttcattttagtgtatctattataggtttttgttttgtggttactgtgagacttacaaggacatcttatagcttatagcaattattttatactgatgacagcttaactttgatcacaaagcaaagaaaaacaaaacaacaaaagaaaaaactaaacaactctacactttaactccatctcctctcacatgttgacttatgtttgtatggatttacatcattttatattgactatctcttaataaattgtaattactattattttgatagagttgtcttttggtcttcataagatctgagtggttgaggcaccacaattacagtattagaatattctgaatttgtctgtgtacttacttttatcagtgagttttatacattcaaatgttttcttattgcacatttgtgttcttttttttctgactgaaaaaactctctttagcatatcatgtaagacaggtctggtggtaataaattcactcaacttctgtttgcctgagaaatactttttctctccatcatgtcgatagttttgctgggtacggtatctcagttggcattttgttttccttgggtctttgaatatgtcaccccacttcctcttggcctataaagtttctgctaagaagtctgctaacagatgtgttgaagcttctttatatttattttgctttttaaattttgcttcctttaaaattctcactttgtctggagctttgaacatttaaattttatatgtcttgtggtgatctcatttgggttgaatctgcttgctaatctttgaccttccggtatttggttattcatatctttctctgggtttggaaagttttctgtttgtccacagcctcccagaccagtgctgtgccagggcttgcccaagggccatggttgctatggcctgcaaccactgaaattttcttgggaccaaggccactttagtcagctggtgataaagtgggctgagactaaggttcttcctgcctaagcagtggattcacctctggcccacggtgggtcaaaatgctccccatatgagcactggtttggaatcaagggccatggggtctctgtcttttgctgtgttccaatgtggtggggccaggtctaagttccgacacaaagtcccacactcttatttccatttcccaagcaggcagtttttctctaagcactgcactatctgggtttggaagagaggcgtttaggcaaggcaagaccatcttttcttacctctttaatgtgttttttctcgttatcatgctaaaatcagggtactgtgatagcgcacctaatttcttgaattcttttgaaggtattttcttgcatggataattatttaatttgatgtttctgtgagaagataatcactaaagggttcttcacagccagcttgctcttctgccattttcttaattgttttctgatatacctgttgttttgcctacccattgatttttttctcctctatcattatttatctttgtggtttggtggttctctgtagccataatgtttgattcctttctctttcttatttgtgtatctgctctaccaaccagttttatacttttgtgtatttttatgatgatagatattgtccttttgcttccagatataggactcccttaagcatctcttgtggggctagtctagtggtgatgaattccctcagtttttgcttgtctggaagagtatttctcctttatttctaaaggatagtttcgcttaatacagtattcttgtttgggaggaggtattttttttttttggcattttgaatatatcatcccatgcttttctggcctgctgctggagaaagtgggattgctggcagtggtggcactgggctccaagtgagtggctctgggaatctgggggggcgcatgcatgactctctctatgctgaggacagactctgtgcttggctgcatctcctgttccctgggcatagggctctgtataggcttgatgcaagggtcatgactacacctttggttgggatcacctggtgtggctatgctacagtcctctaggtggatttggtggaatgtcagcagggccccagggatgtgaagatgcataagctattgggccccaaacatgcgaagataaaggaactattaggccccagggcagagcgtactttggtggtggctacactctcaaaatggtgcagtgctgctgcagcctgtgttccagagaagaggagggaccccagtgtgaattcccactctggaataatgcagttatgtggatgtcagtgaactccctatactggactcagggatcgtgaggaatgtggagctctcctatacctaggatagcaggtatttataatgggaatgtggactgctggggagctcctgtttaccttttctcctcagtggagagtccctcttggctccaagctgatccatgtcacctgcttctcttccctttctatgctatcgccctgagcatctgtgcctcagagagacttggtcactttcttgctgaattccagccttctcccttcaacactctattcaatgtgtggttatctacttgttgttttggtcctttgtggaagtgagtgctgggtgcctgtagttagccatcttgatgatgcttcctccttctttatgtttattattgtatctgcataaaaataataaatcacggccgggtgcggtggctcacgcctgtaatcccagcactttgggaggccgaggcgggcggatcacgaggtcaggagatcgagaccgtcctggctaacacggtgaaaccctatctctactaaaaatacagaacattagctgggagtggtggcgggcacctgtagtcccagctactcgggagggtgaggcaggagaatggcgtgaacccaggaggtggagcttgcagtgagccgagatcgcgccactgcactccagcctgggcgacagagcgagactccgtctcaaaaaaaaaaaaaaaaaaaaaaaacaataacaacaaaaaatcataagcataatttactctagggatgactggggaacttgtagagaagtatagaaggaaatattacattgttgtactctagtttttgatcatttgcgaggtatttatgttctgttctggaaaaaattattaaggcagaaaaaggatcaataccaccttctcatttaaaaaactctaatatttatattaaatacaaagatacccaaaccttttatgcttctttctctgatctgtgtcttttttctttgacagcatctccattttttttctgctgcttcatcgctgtagccatgggaatccgtttcattattatggtaacaatatggagtgctgtattcctaaactgtaagtgacaacagagaagtagattgcaacattgtcaatttaacaatgctaatgtattatttttgttagtattcataaacacagacacataaactagaaatattaaatgtatctttgtcacatttttgctattagtccagaaatttgtaaactatatttgcttatactataagttactaacaatacaaacttttaatacttatggttattttaatagcattattcaaccaagaagttcaaattcccttgaccggtaagtgaatttttaaaatattttagatcatatattatatgtatctacctacattattgtgtagacatgtattccatgattaaaaaaggaaaaagtaattaattctagtctgtaatacactatggcttctgttttccttttaacaatgagggaatacttgtaaaaagtagaggctacttaggtttgacatcatctttctctctctctctctcttttttttttttttttttttgagatggggtctcactctgtcacccaggctggagtgcagtggggtgatctcagcacaatgcaaccttcgcctcccagtttcaagcaattctcatgcctcagcctcccaagtacctgggactgcaacctctacctcctaggttcaagcaattctcctgcctcagcttccaagtagctgggactgcaggcgtgagccaccacacccggctaatttttgtatttttagtagaggcagggtttcaccatgttggccaggctggtatcaaacttctaacctcaagtgagtcacctgccttggcctcccaaagtgctaggattacaggcatgagacaccacacccagcctggcttctctctatgaatatgtagagatatgcctttggttatgactgtaataatttaataatctgaaattttagagttggagtgaaaaaggcatttaatttgtctagacaaaatctgctataatggttcagatgtgtagaattaataatatattctccttttccagaaagttactgtggcccatgtcctaaaaactggatatgttacaaaaataactgctaccaattttttgatgagagtaaaaactggtatgagagccaggcttcttgtatgtctcaaaatgccagccttctgaaagtatacagcaaagaggaccaggttgagtatttattttaatttcccatcctgtatttaatcctaacatctgagacaactcactggaatatgaacctagaacatataagggacactgtgacttggttattctaataccaaccctaaatctttcttcattgaaaataacaaagcacagaaattgtaggtatcatgtatgtgtgctcggatgagaattatgccagttagtggacagaatgcatttttttacaagtgtgagaacagatgaaatggttatggtcttgcgtttactaaaattatcaacactgattttacttatagtttatttgtggtttcaaacaggatttacttaaactggtgaagtcatatcattggatgggactagtacacattccaacaaatggatcttggcagtgggaagatggctccattctctcacccaacctgtaagtctctgacccaatgagtctcttctttttaatttttttcctaagttttccctgtaataattctaatcactcatctcacataatcccaggacatttgcacattctaatagatttagtaaaaagtgcttaggccctaaatttgggagaaagttgtattagttgtagagcagccaacacaaatactagtaagtaatacaaattgtttactatatggtaagtactgtggaaggcaggtctaatatgttcgttttacagataaagagacagaaacagagaggttaaatattacatacatttctttttgaatttattaccagacatgttgagatataattaacatataataaattgcacatatataaagtatacaatttgataagtctcgagaactatatgagcccatgaaaacataaagaacatcaagatagttaacatataaattacctggaaaacattctctaagcatgcacctttgtgatttctcctctgtgtccctatgtccttacctctttctctttccagtcaatcagttttctgtcactttagattagtttgcaattcatagaatttaatataaatgaagtcctacaatatatatcatttgcaatgtcttattttcacttagaaaagttatcttgagattcagccatctcattgcatgagtaaagagttaatttccttttatctcttcatttattgatgtatatttaggtaattcccagttattgatcattacaaataatgctacttgctaataatatttgtgtacaagtatttgtatcatattaacgaaatctttctttcccttaacataaacacctagaaacaaaatggctgaatcatataagtatatacttaactttttttaaagtgccacactgttatccaaagtggtgatgatattttacaaattttactttctacctagcagtatgtaagagaaaatctgacagagaagttgcttcacatcctagtcaacacttgttttgatcagcctcttaaattttatactggctgggtgcagtggtttatgcctataatcccagcactttgggaggccgaggcaggcagatcacttgaggtcatgagttcaagaccaacctggccaatgcagtgaaaccctgtctctactaaaaatacaaaaattagctggacggggtggcaggtgtctgtaatcccagctactcgggaggctgaggcaggggaatggcttgaacccgggagacggaggttgcagtgagccgagattgcgccgctgcactccagcctgagtgacagagcaagaccctgtctcataaataaataaataaataaataagtaaatttcagacacactaaatgatgtgttttggtatatgaatgtagttttaacttgcattttactaatgcaatgatgttaagtagcatttttttgtgtgtgcttatttgccatttaggtaaaaattttcttctcactgatttctgctttgatctttattatttactgtcttcttatagtaggttaaatttgcttttttagtttcttatattgaaagctgatatgttgatttgaaacctttttttctaataaaagttatactattaatatgtgagatgatttggcaacatcccgtcatattttgagatactactttttgtttccattcagttaaaaatagtttctaaattgtcttttgcattctttgattcattgattatttacatgtgtcatttagttttcaacatttgtgaatttttcagacatttttattattgatttctaatttaatttcattttcattagcgaattattttgtataatttaaaacttaaatttattgacatcagtgttatggactagactatagtgtgtttttaaaaatgttttaggtgtatttgatcagaaatgtttattctgctgttttctatgtattctatgtgataacctttgaaatacaaagttttgtaatatggctggtagaaacaggcaaaatactagaccctatgttagcactaagtattgtttaccctaaatcttttcagacagttctttctccatcctggagtagttttttacatacatgcattagtaagtactctgctgaatattcaaaggtgaccttctgcatatctttacatttctttatttcttcaaatctcttatctccatttctgtgtccggtgaactacagcttggtctttctggattctgaagtgtcccatgtctgtagtttttatagcctgctcttttacccacttgattgcacagagcaattcagcacacccagactaagtgacaacatcttaatgttcactgatcttatgaatatagttgtaattctccagattaatgctagagtattcaagaaaggtcatttctaccatttgaaagatctgacctgtcactacactgttcagtaatttcttcattcagctacaacgatcaggaatgaaacctaagcattttgtcactactgcttttccttttttcagtctcataatatcacaaatattgcagaagtcctctagattgtaaatattataattctttatttcaaggggactttagatatttgaatttccaattcttcaatgtaataaaaagtcacaacaatatcaatgttaaaattaggttaattaggtgcttcctgtctgtcagacacagatttaagcacttaaatgtatcctttcattaaatatacttaacaatcctgtatacaggtgttattttaacctaattctaatggtatacaacagaatcttaacatgttaaataactcacttaagttacaaaatgaataattgttgcaatgaggactcaaatatatatatttctggctctggagccagacttactattaaatgactaaaaaagtgctcttttcgctgatttttaaatttactttgctactttaatgattaattggcaatgatcaatgcacaaccttttactctcatgtgttattttcaattttccccttgtgtttattgtagcaagaactccctaccttccttccttattatctatttgtaatttggaagccccagtataccttagaattgatccaggatggcctcatttatgtatggcttgagagtttttttaacagaaaaaacattgattctctaaaaaataagagtttatatcatagtttctcaatattttcctatctacaaggacaaaattttttttcagaagcaaaacaactagcatactaactttctgtttatgcatgtagtaaatattggttgattactgcacaatttccaggaattatgcagagataactacagagatgagtagaataaaactcattttagagcttcaaactctagtcagagatgtagttacaaacaaataatccagtgtagttagttaggtactctggcagaagtgtaatgaaagtagtatgaaaaaacagagaaagaaatcgaaggaacacatggacaaagtgatattaaaaagaatgaggccgggtgcagtggctcacgcctgtgatcccagcactttgggaggacctgaggtcaggagttcaagtccagcttggccaacatggtgaaagctcatctttactaaaaatacaaaaattagccagatgtggtggcaagtgcctgtaaccccagctactcctgaggctgaggggcagcagaattgcttgaacccaggaggtggaggttgcagtgagccgagattgcgccactgcactccagcctggctgacaagagcaaaacactgtcaaaaaaaaaaaaaagagagagaggaaagaaagaaaaaaagaacgagactctaatgtagactgaacctagtaagagcagttattaaaaaatctcagctggggccgggtgcagtggctcacacctgtaatcccagcactttgggaggccgaggtgggtgtattgctttaggtcaggagtttataaccagcctggcaacgtagtgaaacaccatctctactaaaaataaaaaaattagccggatgtggtggcacatgcctgtaatcccagctacttacgaaactgacacaggagaatcacttgaacttgggaggcagagtttgcagtgagccgagattgaaccagtgcactccagccttggcagcggagcaagattctgtctaaaaacaaacaaacaacaaaacaaaaactctttaagaatagttttctccctacagtggccgattgttcagttacagaacagagatcattacatcgtctttttaaatagggatagcatcagaccataatctttttatttttttgtcaattttacattgaagtgacatcctcactctttcttgagctttctatttcccatctcttatgaaagaaaacaaagtatcattattaatcatataactccaaaagattaaagatgccagagtaaaacacatatatagatatagaaatctccacatggaatgcctaaacatatgcacacacacacacacacacacttatacacacttgtgaatgtgtgtatgtatgtattagatttgaaattttattttcatttccttaccaagtaaaattgcatatatctgaagaaaatgttttatttttccacaaaacacagtatcaaattctaaattgaacactgaatttatttctcacttaaatatttgttttaaaataaacattctaaagttttcatttaacttgggtatacatatgaagagattttagacttcagaattggctagtttctgatgtatgataaaaagagtggcgcattatttataatttttatttttattatctgagttggctatattttgtttatgaattaggaccaggcatggtccataatctcctaaaatggtattaagttcctgtatttgaagttcaataggtatgattcatttttattttcccgcgttaataaaatcatgtatgtaatttgtaattgtctctcctctagactaacaataattgaaatgcagaagggagactgtgcactctatgcctcgagctttaaaggctatatagaaaactgttcaactccaaatacgtacatctgcatgcaaaggactgtgtaaagatgatcaaccatctcaataaaagccaggaacagagaagagattacaccagcggtaacactgccaactgagactaaaggaaacaaacaaaaacaggacaaaatgaccaaagactgtcagatttcttagactccacaggaccaaaccatagaacaatttcactgcaaacatgcatgattctccaagacaaaagaagagagatcctaaaggcaattcagatatccccaaggctgcctctcccaccacaagcccagagtggatgggctgggggaggggtgctgttttaatttctaaaggtaggaccaacacccaggggatcagtgaaggaagagaaggccagcagatcactgagagtgcaaccccaccctccacaggaaattgcctcatgggcagggccacagcagagagacacagcatgggcagtgccttccctgcctgtgggggtcatgctgccacttttaatgggtcctccacccaacggggtcagggaggtggtgctgccccagtgggccatgattatcttaaaggcattattctccagccttaagtaagatcttaggacgtttcctttgctatgatttgtacttgcttgagtcccatgactgtttctcttcctctctttcttccttttggaatagtaatatccatcctatgtttgtcccactattgtattttggaagcacataacttgtttggtttcacaggttcacagttaagaaggaattttgcctctgaataaatagaatcttgagtctcatgca

SEQ ID NO: 105 - RNA, 1576 nt, Homo sapiens
  source 1..1576: mol_type = mRNA
actttcaattctagatcaggaactgaggacatatctaaattttctagttttatagaaggcttttatccacaagaatcaagatcttccctctctgagcaggaatcctttgtgcattgaagactttagattcctctctgcggtagacgtgcacttataagtatttgatggggtggattcgtggtcggaggtctcgacacagctgggagatgagtgaatttcataattataacttggatctgaagaagagtgatttttcaacacgatggcaaaagcaaagatgtccagtagtcaaaagcaaatgtagagaaaatgcatctccattttttttctgctgcttcatcgctgtagccatgggaatccgtttcattattatggtaacaatatggagtgctgtattcctaaactcattattcaaccaagaagttcaaattcccttgaccgaaagttactgtggcccatgtcctaaaaactggatatgttacaaaaataactgctaccaattttttgatgagagtaaaaactggtatgagagccaggcttcttgtatgtctcaaaatgccagccttctgaaagtatacagcaaagaggaccaggatttacttaaactggtgaagtcatatcattggatgggactagtacacattccaacaaatggatcttggcagtgggaagatggctccattctctcacccaacctactaacaataattgaaatgcagaagggagactgtgcactctatgcctcgagctttaaaggctatatagaaaactgttcaactccaaatacgtacatctgcatgcaaaggactgtgtaaagatgatcaaccatctcaataaaagccaggaacagagaagagattacaccagcggtaacactgccaactgagactaaaggaaacaaacaaaaacaggacaaaatgaccaaagactgtcagatttcttagactccacaggaccaaaccatagaacaatttcactgcaaacatgcatgattctccaagacaaaagaagagagatcctaaaggcaattcagatatccccaaggctgcctctcccaccacaagcccagagtggatgggctgggggaggggtgctgttttaatttctaaaggtaggaccaacacccaggggatcagtgaaggaagagaaggccagcagatcactgagagtgcaaccccaccctccacaggaaattgcctcatgggcagggccacagcagagagacacagcatgggcagtgccttccctgcctgtgggggtcatgctgccacttttaatgggtcctccacccaacggggtcagggaggtggtgctgccccagtgggccatgattatcttaaaggcattattctccagccttaagtaagatcttaggacgtttcctttgctatgatttgtacttgcttgagtcccatgactgtttctcttcctctctttcttccttttggaatagtaatatccatcctatgtttgtcccactattgtattttggaagcacataacttgtttggtttcacaggttcacagttaagaaggaattttgcctctgaataaatagaatcttgagtctcatgca

SEQ ID NO: 106 - protein, 699 aa, synthetic construct
AQVLRGTVTDFPGFDERADAETLRKAMKGLGTDEESILTLLTSRSNAQRQEISAAFKTLFGRDLLDDLKSELTGKFEKLIVALMKPSRLYDAYELKHALKGAGTNEKVLTEIIASRTPEELRAIKQVYEEEYGSSLEDDVVGDTSGYYQRMLVVLLQANRDPDAGIDEAQVEQDAQALFQAGELKWGTDEEKFITIFGTRSVSHLRKVFDKYMTISGFQIEETIDRETSGNLEQLLLAVVKSIRSIPAYLAETLYYAMKGAGTDDHTLIRVMVSRSEIDLFNIRKEFRKNFATSLYSMIKGDTSGDYKKALLLLCGEDDGGGGDKTHTCPPCPAPELLGGPSVFLFPPKPKDTLMISRTPEVTCVVVDVSHEDPEVKFNWYVDGVEVHNAKTKPREEQYNSTYRVVSVLTVLHQDWLNGKEYKCKVSNKALPAPIEKTISKAKGQPREPQVYTLPPSRDELTKNQVSLTCLVKGFYPSDIAVEWESNGQPENNYKTTPPVLDSDGSFFLYSKLTVDKSRWQQGNVFSCSVMHEALHNHYTQKSLSLSPGKGGGGSGGGGSFLNSLFNQEVQIPLTESYCGPCPKNWICYKNNCYQFFDESKNWYESQASCMSQNASLLKVYSKEDQDLLKLVKSYHWMGLVHIPTNGSWQWEDGSILSPNLLTIIEMQKGDCALYASSFKGYIENCSTPNTYICMQRTV

SEQ ID NO: 107 - protein, 27 aa, synthetic construct
MASPLTRFLSLNLLLLGESIILGSGEA

SEQ ID NO: 108 - protein, 21 aa, synthetic construct
MALPVTALLLPLALLLHAARP

SEQ ID NO: 109 - protein, 5 aa, synthetic construct
GGGGS

SEQ ID NO: 110 - protein, 10 aa, synthetic construct
GGGGSGGGGS

SEQ ID NO: 111 - protein, 15 aa, synthetic construct
GGGGSGGGGSGGGGS

SEQ ID NO: 112 - protein, 20 aa, synthetic construct
GGGGSGGGGSGGGGSGGGGS

SEQ ID NO: 113 - protein, 25 aa, synthetic construct
GGGGSGGGGSGGGGSGGGGSGGGGS

SEQ ID NO: 114 - protein, 30 aa, synthetic construct
GGGGSGGGGSGGGGSGGGGSGGGGSGGGGS

SEQ ID NO: 115 - protein, 35 aa, synthetic construct
GGGGSGGGGSGGGGSGGGGSGGGGSGGGGSGGGGS

SEQ ID NO: 116 - protein, 40 aa, synthetic construct
GGGGSGGGGSGGGGSGGGGSGGGGSGGGGSGGGGSGGGGS

SEQ ID NO: 117-119 - skipped (3 entries)

SEQ ID NO: 120 - protein, 4 aa, synthetic construct
GGGG

SEQ ID NO: 121 - protein, 5 aa, synthetic construct
GGGGG

SEQ ID NO: 122 - protein, 6 aa, synthetic construct
GGGGGG

SEQ ID NO: 123 - protein, 7 aa, synthetic construct
GGGGGGG

SEQ ID NO: 124 - protein, 8 aa, synthetic construct
GGGGGGGG

SEQ ID NO: 125 - protein, 5 aa, synthetic construct
EAAAK

SEQ ID NO: 126 - protein, 10 aa, synthetic construct
EAAAKEAAAK

SEQ ID NO: 127 - protein, 15 aa, synthetic construct
EAAAKEAAAKEAAAK

SEQ ID NO: 128 - protein, 20 aa, synthetic construct
EAAAKEAAAKEAAAKEAAAK

SEQ ID NO: 129 - protein, 25 aa, synthetic construct
EAAAKEAAAKEAAAKEAAAKEAAAK

SEQ ID NO: 130 - protein, 30 aa, synthetic construct
EAAAKEAAAKEAAAKEAAAKEAAAKEAAAK

SEQ ID NO: 131 - protein, 35 aa, synthetic construct
EAAAKEAAAKEAAAKEAAAKEAAAKEAAAKEAAAK

SEQ ID NO: 132 - protein, 40 aa, synthetic construct
EAAAKEAAAKEAAAKEAAAKEAAAKEAAAKEAAAKEAAAK

SEQ ID NO: 133 - protein, 14 aa, synthetic construct
GSTSGSGKSSEGKG

SEQ ID NO: 134 - protein, 28 aa, synthetic construct
GSTSGSGKSSEGKGGSTSGSGKSSEGKG

SEQ ID NO: 135 - protein, 42 aa, synthetic construct
GSTSGSGKSSEGKGGSTSGSGKSSEGKGGSTSGSGKSSEGKG

SEQ ID NO: 136 - protein, 56 aa, synthetic construct
GSTSGSGKSSEGKGGSTSGSGKSSEGKGGSTSGSGKSSEGKGGSTSGSGKSSEGKG

SEQ ID NO: 137 - protein, 70 aa, synthetic construct
GSTSGSGKSSEGKGGSTSGSGKSSEGKGGSTSGSGKSSEGKGGSTSGSGKSSEGKGGSTSGSGKSSEGKG

SEQ ID NO: 138 - protein, 84 aa, synthetic construct
GSTSGSGKSSEGKGGSTSGSGKSSEGKGGSTSGSGKSSEGKGGSTSGSGKSSEGKGGSTSGSGKSSEGKGGSTSGSGKSSEGKG

SEQ ID NO: 139 - protein, 98 aa, synthetic construct
GSTSGSGKSSEGKGGSTSGSGKSSEGKGGSTSGSGKSSEGKGGSTSGSGKSSEGKGGSTSGSGKSSEGKGGSTSGSGKSSEGKGGSTSGSGKSSEGKG

SEQ ID NO: 140 - protein, 112 aa, synthetic construct
GSTSGSGKSSEGKGGSTSGSGKSSEGKGGSTSGSGKSSEGKGGSTSGSGKSSEGKGGSTSGSGKSSEGKGGSTSGSGKSSEGKGGSTSGSGKSSEGKGGSTSGSGKSSEGKG

SEQ ID NO: 141 - protein, 18 aa, synthetic construct
GSTSGSGKPGSGEGSTKG

SEQ ID NO: 142 - protein, 36 aa, synthetic construct
GSTSGSGKPGSGEGSTKGGSTSGSGKPGSGEGSTKG

SEQ ID NO: 143 - protein, 54 aa, synthetic construct
GSTSGSGKPGSGEGSTKGGSTSGSGKPGSGEGSTKGGSTSGSGKPGSGEGSTKG

SEQ ID NO: 144 - protein, 72 aa, synthetic construct
GSTSGSGKPGSGEGSTKGGSTSGSGKPGSGEGSTKGGSTSGSGKPGSGEGSTKGGSTSGSGKPGSGEGSTKG

SEQ ID NO: 145 - protein, 90 aa, synthetic construct
GSTSGSGKPGSGEGSTKGGSTSGSGKPGSGEGSTKGGSTSGSGKPGSGEGSTKGGSTSGSGKPGSGEGSTKGGSTSGSGKPGSGEGSTKG

SEQ ID NO: 146 - protein, 108 aa, synthetic construct
GSTSGSGKPGSGEGSTKGGSTSGSGKPGSGEGSTKGGSTSGSGKPGSGEGSTKGGSTSGSGKPGSGEGSTKGGSTSGSGKPGSGEGSTKGGSTSGSGKPGSGEGSTKG

SEQ ID NO: 147 - protein, 126 aa, synthetic construct
GSTSGSGKPGSGEGSTKGGSTSGSGKPGSGEGSTKGGSTSGSGKPGSGEGSTKGGSTSGSGKPGSGEGSTKGGSTSGSGKPGSGEGSTKGGSTSGSGKPGSGEGSTKGGSTSGSGKPGSGEGSTKG

SEQ ID NO: 148 - protein, 144 aa, synthetic construct
GSTSGSGKPGSGEGSTKGGSTSGSGKPGSGEGSTKGGSTSGSGKPGSGEGSTKGGSTSGSGKPGSGEGSTKGGSTSGSGKPGSGEGSTKGGSTSGSGKPGSGEGSTKGGSTSGSGKPGSGEGSTKGGSTSGSGKPGSGEGSTKG

What is claimed is:

1. A chimeric fusion protein, comprising: a phosphatidylserine (PS) binding domain operably linked to an immunostimulatory domain.

2. The chimeric fusion protein of claim 1, wherein the PS binding domain comprises Annexin A1 or the PS-binding core domain, Annexin A2, Annexin A3, Annexin A4, Annexin A5, Annexin A6, Annexin A7, Annexin A8, Annexin A8 Like 1, Annexin A9, Annexin A10, Annexin A11, Annexin A13, Adhesion G Protein Coupled Receptor B1 or the extracellular domain thereof, Apolipoprotein H, Coagulation Factor II, Coagulation Factor VII, Coagulation Factor IX, Coagulation Factor X, Growth Arrest Specific 6, Milk Fat Globule EGF And Factor V/VIII Domain Containing, Advanced Glycosylation End-Product Specific Receptor or the extracellular domain thereof, Protein S, Hepatitis A Virus Cellular Receptor 1 or the extracellular domain thereof, Hepatitis A Virus Cellular Receptor 2 or the extracellular domain thereof, T Cell Immunoglobulin and Mucin Domain Containing or the extracellular domain thereof, Protein Kinase C alpha or the C2 domain thereof, Synaptotagmin (Syt1) or the C2A domain thereof, Stabilin-1 or the extracellular domain thereof, or Stabilin-2 or the extracellular domain thereof.

3. The chimeric fusion protein of claim 1, wherein the PS binding domain comprises the single-chain variable domain of bavituximab, PGN632, P1, IS4, or CL1.

4. The chimeric fusion protein of claim 1, wherein the immunostimulatory domain comprises a single-chain antibody (scFv) to a human CD3 protein.

5. The chimeric fusion protein of claim 4, wherein the CD3 antibody comprises a OKT3 or humanized OKT3 antibody, a UCHT1 or humanized UCHT1 antibody, TRX4 (otlixizumab), foralumab, visilizumab, or tepilizumab.

6. The chimeric fusion protein of claim 1, wherein the PS-binding domain operably linked to an immunostimulatory domain is fused to an additional immunostimulatory domain.

7. The chimeric fusion protein of claim 6, wherein the additional immunostimulatory domain comprises an IgG1, IgG2, IgG3, or IgG4.

8. An isolated nucleic acid molecule encoding the chimeric fusion protein of any preceding claim.

9. A recombinant vector comprising the isolated nucleic acid molecule of claim 8.

10. The recombinant vector of claim 9, wherein the recombinant vector comprises a recombinant viral vector.

11. The recombinant vector of claim 10, wherein the recombinant viral vector comprises an adenovirus viral vector, an adeno-associated viral vector, a lentiviral viral vector, or a herpes simplex viral vector.

12. An antibody drug conjugate comprising the chimeric fusion protein of any one of claims 1-7.

13. An antibody drug conjugate comprising of the chimeric fusion protein where the PS-binding domain is operably linked to a Fc domain of IgG1, IgG2, IgG3, or IgG4.

14. A pharmaceutical formulation comprising the chimeric fusion protein of any one of claims 1-7, the isolated nucleic acid molecule of claim 8, the recombinant vector of any one of claims 9-11, and/or the antibody drug conjugate of claim 12 or claim 13; and one or more pharmaceutically acceptable carriers.

15. A method of treating a hematological cancer, the method comprising: administering to a subject in need thereof a therapeutically effective amount of the pharmaceutical formulation of claim 14, wherein, following administration, an immune response against PS-expressing hematological cancer cells is induced.

16. The method of claim 15, wherein the subject is treatment-naïve.

17. The method of claim 15, wherein the subject has received one or more anti-cancer therapies and/or treatments prior to the administering of the pharmaceutical formulation.

18. The method of claim 17, wherein the one or more anti-cancer therapies and/or treatments comprises endocrine therapy, radiotherapy, hormone therapy, gene therapy, thermal therapy, ultrasound therapy, or any combination thereof.

19. The method of claim 17, wherein the one or more anti-cancer therapies and/or treatments comprise one or more chemotherapeutic agents.

20. The method of claim 15, wherein the subject has one or more hematological cancers.

21. The method of claim 20, wherein the one or more hematological cancers comprise lymphoma, leukemia, and multiple myeloma.

22. The method of claim 20, wherein the one or more hematological cancers comprise acute myeloid leukemia (AML) or myelodysplastic syndrome.

23. The method of claim 15, wherein administering the pharmaceutical formulation comprises oral administration, intravenous administration, intratumor administration, intraperitoneal administration, intracranial administration, subcutaneous administration, intrathecal administration, or any combination thereof.

24. The method of claim 15, further comprising monitoring the subject for adverse effects.

25. The method of claim 24, wherein in the absence of adverse effects, the method further comprises continuing to administering to the subject the pharmaceutical formulation.

26. The method of claim 24, wherein in the presence of adverse effects, the method further comprises modifying one or more steps of the method.

27. The method of claim 17-18, further comprising repeating the administering to the subject of one or more additional anti-cancer therapies.

28. The method of claim 14, wherein the survivability of the subject is increased and/or improved.

29. The method of claims 18-19 or claim 27, wherein the method improves the efficacy of one or more anti-cancer therapies and/or treatments.

30. The method of claim 15, further comprising administering to the subject genetically modified T cells or NK cells or macrophages expressing a chimeric antigen receptor targeting phosphatidylserine (PS) or a pharmaceutical formulation thereof.
